(19) United States
(12) Patent Application Publication
(10) Pub. No.: US 2025/0059541 A1
(43) Pub. Date: Feb. 20, 2025

(54) SNCA-TARGETING SIRNA COMPOSITIONS FOR TREATING SNCA-ASSOCIATED DISEASE

(71) Applicant: Alnylam Pharmaceuticals, Inc., Cambridge, MA (US)

(72) Inventors: Lan Thi Hoang Dang, Arlington, MA (US); Mark K. Schlegel, Boston, MA (US); Joseph Barry, Arlington, MA (US); Tuyen M. Nguyen, Milton, MA (US); Adam Castoreno, Framingham, MA (US); Kawai So, Cambridge, MA (US)

(21) Appl. No.: 18/898,882

(22) Filed: Sep. 27, 2024

Related U.S. Application Data
(63) Continuation of application No. PCT/US2023/065196, filed on Mar. 31, 2023.
(60) Provisional application No. 63/326,813, filed on Apr. 2, 2022.
(60) Provisional application No. 63/326,770, filed on Apr. 1, 2022.

(51) Int. Cl. C12N 15/113; A61P 25/16

(52) U.S. Cl. CPC C12N 15/113; A61P 25/16; C12N 2310/11; C12N 2310/312; C12N 2310/315; C12N 2310/321; C12N 2310/322

(57) ABSTRACT

The disclosure relates to double stranded ribonucleic acid (dsRNAi) agents and compositions targeting a SNCA gene, particularly in a CNS tissue, as well as methods of inhibiting expression of a SNCA gene and methods of treating subjects having a SNCA-associated neurodegenerative disease or disorder, e.g., Parkinson's Disease (PD), multiple system atrophy (MSA), Lewy body dementia (LBD), among other synucleinopathies, using such dsRNAi agents and compositions.

### CROSS-REFERENCE TO RELATED APPLICATIONS

[0001] This application is a 35 § U.S.C. 111(a) continuation application which claims the benefit of priority to PCT/US2023/065196, filed on Mar. 31, 2023, which, in turn, claims the benefit of priority to U.S. Provisional Patent Application No. 63/326,813, entitled “SNCA-Targeting siRNA Compositions for Treating SNCA-Associated Disease,” filed on Apr. 2, 2022; and to U.S. provisional patent application No. 63/326,770, entitled “SNCA-Targeting siRNA Compositions for Treating SNCA-Associated Disease,” filed on Apr. 1, 2022. The entire contents of each of the aforementioned patent applications are incorporated herein by this reference.

### FIELD OF THE INVENTION

[0002] The instant disclosure relates generally to SNCA-targeting RNAi agents and methods.

### SEQUENCE LISTING

[0003] The instant application contains a Sequence Listing which has been submitted electronically in XML file format and is hereby incorporated by reference in its entirety. Said XML copy, created on Oct. 17, 2024, is named 121301_23203_SL_10172024.xml and is 3,320,320 bytes in size.

### BACKGROUND OF THE INVENTION

[0004] The SNCA gene encodes a presynaptic neuronal protein, α-synuclein (also referred to as alphα-synuclein or synuclein-alpha herein), which has been linked genetically and neuropathologically to Parkinson's disease (PD) (Stefanis, L. Cold Spring Harb Perspect Med. 2: a009399). α-Synuclein is viewed to contribute to PD pathogenesis in a number of ways, but it is generally believed that aberrant soluble oligomeric conformations of α-synuclein, termed protofibrils, are the toxic species that mediate disruption of cellular homeostasis and neuronal death, through effects on various intracellular targets, including synaptic function. Furthermore, secreted α-synuclein is believed to exert deleterious effects on neighboring cells, thus possibly contributing to disease propagation. Although the extent to which α-synuclein is involved in all cases of PD is not clear, targeting the toxic functions conferred by this protein when it is dysregulated presents a potentially valuable therapeutic strategy, not only for PD, but also for other neurodegenerative conditions, termed synucleinopathies, which all exhibit common neuropathological hallmarks as a result of alphα-synuclein accumulation, referred to as Lewy bodies (LBs) and Lewy neurites (LNs). In addition to PD, such documented or suspected SNCA-related synucleinopathies include, without limitation, multiple system atrophy (MSA), Lewy body dementia (LBD), pure autonomic failure (PAF), Pick's disease, progressive supranuclear palsy, dementia pugilistica, parkinsonism linked to chromosome 17, Lytico-Bodig disease, tangle predominant dementia, Argyrophilic grain disease, ganglioglioma, gangliocytoma, meningioangiomatosis, subacute sclerosing panencephalitis, lead encephalopathy, tuberous sclerosis, Hallervorden-Spatz disease, lipofuscinosis, corticobasal degeneration, frontotemporal dementia, frontotemporal lobar degeneration, Alzheimer's disease, Huntington's disease, Down's syndrome, psychosis, schizophrenia and Creutzfeldt-Jakob disease.

[0005] PD, LBD, and MSA are the two most prevalent examples of neurodegenerative disorders with SNCA brain pathology, PD is the most common movement disorder and is characterized by rigidity, hypokinesia, tremor and postural instability. PD is believed to affect approximately four to six million people worldwide, LBD represents 5-15% of all dementia. In addition to forgetfulness and other dementing symptoms that often fluctuate, LBD patients typically suffer from recurrent falls and visual hallucinations. MSA is a rapidly progressing orphan disorder leading to severe motor disability in an affected subject within a few years. The prevalence of MSA is reported to be between 3.4-4.9 cases per 100,000 population.

[0006] Apart from the neuropathological changes observed in α-synucleinopathies, levels of α-synuclein protein are generally increased in affected brain regions (Klucken et at, 2006).

[0007] α-Synuclein monomers, tetramers and fibrillar aggregates are a major component of Lewy body (LB)-like intraneuronal inclusions, glial inclusions and axonal spheroids in neurodegeneration with brain iron accumulation. Lewy-related pathology (LRP), primarily comprised of α-synuclein, is present in a majority of Alzheimer's autopsies, and higher levels of α-synuclein in patients have been linked to cognitive decline (Twohig et al. (2019) Molecular Neurodegeneration). Autosomal dominant mutations in the SNCA gene including, among others, A53T, A30P, E46K, and H50Q (Zarranz et al. (2004) Ann. Neurol. 55, 164-173, Choi et al. (2004) FEBS Lett. 576, 363-368, and Tsigelny et al. (2015) ACS Chem. Neurosci. 6, 403-416), A53T (Polymeropoulos et al. (1997) Science), as well as triplications and duplications, have been identified to run in families afflicted with associated neurodegenerative diseases. The preceding indicates that not only pathogenic mutations in SNCA, but also increases in alphα-synuclein protein, impact disease outcome.

[0008] The role of SNCA mutations in disease onset is not well understood; however, evidence points to a toxic gain-of-function inherent in the normal α-synuclein protein when it exceeds a certain level (Stefanis et al. (2012) Cold Spring Harb Perspect Med.) and/or interacts aberrantly with cellular lipids and vesicles (reviewed in Kiechler et al. (2020) Front. Cell Dev. Biol). In apparent agreement with this, SNCA null mice, in contrast to transgenic over-expressors, displayed no overt neuropathological or behavioral phenotype (Abeliovich et al. (2000) Neuron). Posttranscriptional regulation of SNCA was also shown to occur through endogenous microRNAs, binding to the 3′ end of the gene (Junn et al. (2009) PNAS 106: 13052-13057; Doxakis (2010), JBC). Further, studies on the familial point mutations in SNCA demonstrated suppressed expression, especially in cases with prolonged disease onset (Markopoulou et al. (1999) Ann Neurol. 46(3):374-81 and Kobayashi et al. (2003) Brain 126(Pt 1):32-42). Similarly, Voutsinas et al. (2010) Hum Mutat. 31(6):685-91) found that over-expression of even wild-type SNCA messenger RNA (mRNA) was responsible for disease onset. These data indicate that suppression of total SNCA levels would lower α-synuclein-induced toxicity.

[0009] There are no disease modifying treatments for synucleinopathies, including PD, multiple system atrophy, and Lewy body dementia, and treatment options are limited, e.g., merely palliative. For example, at present, only symptomatic treatments are available for PD patients (by-substituting the loss of active dopamine in the brain) and AD patients (i.e., cholinesterase inhibitors). None of the existing treatment strategies for α-synucleinopathies are directed against the underlying disease processes.

[0010] Thus, noting the described involvement of SNCA in several neurodegenerative disorders (synucleinopathies), there remains a need for an agent—particularly a central nervous system (CNS)-directed agent, given the described functionality of α-synuclein in CNS tissue—that can selectively and efficiently silence the SNCA gene (e.g., eliminating or reducing the effect of toxic α-synuclein species) using the cell's own RNAi machinery that has both high biological activity and in vivo stability, and that can effectively inhibit expression of a target SNCA gene.

### BRIEF SUMMARY OF THE INVENTION

[0011] The present disclosure provides RNAi agent compositions which affect the RNA-induced silencing complex (RISC)-mediated cleavage of RNA transcripts of a Synuclein alpha (SNCA) gene. The SNCA gene may be within a cell, e.g., a cell within a subject, such as a human. In certain embodiments, the RNAi agent is designed and directed for knockdown of SNCA in cells and/or tissues of the CNS. The present disclosure also provides methods of using the RNAi agent compositions of the disclosure for inhibiting the expression of a SNCA gene or for treating a subject who would benefit from inhibiting or reducing the expression of a SNCA gene, e.g., a subject suffering or prone to suffering from a SNCA-associated neurodegenerative disease or disorder, e.g., PD, multiple system atrophy (MSA), Lewy body dementia (LBD), pure autonomic failure (PAF), Pick's disease, progressive supranuclear palsy, dementia pugilistica, parkinsonism linked to chromosome 17, Lytico-Bodig disease, tangle predominant dementia, Argyrophilic grain disease, ganglioglioma, gangliocytoma, meningioangiomatosis, subacute sclerosing panencephalitis, lead encephalopathy, tuberous sclerosis, Hallervorden-Spatz disease, lipofuscinosis, corticobasal degeneration, frontotemporal dementia, frontotemporal lobar degeneration, Alzheimer's disease and Huntington's disease.

Accordingly, in one aspect, the instant disclosure provides a double stranded ribonucleic acid (dsRNA) agent for inhibiting expression of SNCA, where the dsRNA agent includes a sense strand having a 5′-terminus and a 3′-terminus and an antisense strand having a 5′-terminus and a 3′-terminus, where the sense strand and the antisense strand form a double stranded region, where: the sense strand includes a nucleotide sequence of Table 3 (SEQ ID NOs: 142-184), with 0 or 1 mismatches; the sense strand of the dsRNA agent includes a lipophilic moiety attached at position 6 or 16, counting from the 5′-terminus of the sense strand; the antisense strand includes a nucleotide sequence of Table 3 (SEQ ID NOs: 185-227), with 0 or 1 mismatches; the dsRNA agent does not include a GalNAc modification; and the dsRNA agent includes eight phosphorothioate internucleotide linkages positioned at the penultimate and ultimate internucleotide linkages from the respective 3′- and 5′-termini of each of the sense and antisense strands of the dsRNA agent.

[0012] In certain embodiments, the lipophilic moiety is an aliphatic, alicyclic, or polyalicyclic compound.

[0013] In some embodiments, the lipophilic moiety is lipid, cholesterol, retinoic acid, cholic acid, adamantane acetic acid, 1-pyrene butyric acid, dihydrotestosterone, 1,3-bis-O(hexadecyl)glycerol, geranyloxyhexyanol, hexadecylglycerol, borneol, menthol, 1,3-propanediol, heptadecyl group, palmitic acid, myristic acid, 03-(oleoyl)lithocholic acid, 03-(oleoyl)cholenic acid, dimethoxytrityl, or phenoxazine.

[0014] In one embodiment, the lipophilic moiety contains a saturated or unsaturated C₄-C₃₀ hydrocarbon chain, and an optional functional group consisting of hydroxyl, amine, carboxylic acid, sulfonate, phosphate, thiol, azide, or alkyne.

[0015] In some embodiments, the lipophilic moiety contains a saturated or unsaturated C₆-C₁₈ hydrocarbon chain. Optionally, the lipophilic moiety contains a saturated or unsaturated C₁₆ hydrocarbon chain.

[0016] In an embodiment, the lipophilic moiety is

[chemical structure]

where B is a nucleotide base or a nucleotide base analog. Optionally, B is adenine, guanine, cytosine, thymine or uracil.

[0017] In certain embodiments, the lipophilic moiety is attached via a linker or carrier. Optionally, the lipophilic moiety is conjugated via a carrier that replaces the nucleotide at position 6 or 16 of the sense strand (counting from the 5′-terminal nucleotide of the sense strand as position 1). In a related embodiment, the carrier is a cyclic group (e.g., a pyrrolidinyl, pyrazolinyl, pyrazolidinyl, imidazolinyl, imidazolidinyl, piperidinyl, piperazinyl, [1,3]dioxolanyl, oxazolidinyl, isoxazolidinyl, morpholinyl, thiazolidinyl, isothiazolidinyl, quinoxalinyl, pyridazinonyl, tetrahydrofuranyl, or decalinyl) or is an acyclic moiety based on a serinol backbone or a diethanolamine backbone.

[0018] In some embodiments, the lipophilic moiety is conjugated to the dsRNA agent via a linker containing an ether, thioether, urea, carbonate, amine, amide, maleimide-thioether, disulfide, phosphodiester, sulfonamide linkage, a product of a click reaction, or carbamate.

[0019] In one embodiment, the lipophilic moiety is conjugated to the dsRNA agent via a bio-cleavable linker that is DNA, RNA, disulfide, amide, functionalized monosaccharides or oligosaccharides of galactosamine, glucosamine, glucose, galactose, and/or mannose, or a combination thereof.

[0020] In certain embodiments, substantially all of the nucleotides of the sense strand, or of the antisense strand, or both, are modified nucleotides.

[0021] In one embodiment, all of the nucleotides of the sense strand are modified nucleotides.

[0022] In another embodiment, all of the nucleotides of the antisense strand are modified nucleotides.

[0023] In an additional embodiment, all of the nucleotides of the sense strand and all of the nucleotides of the antisense strand are modified nucleotides.

[0024] In certain embodiments, the dsRNA agent has one or more modified nucleotides, where at least one of the one or more modified nucleotides is a deoxy-nucleotide, a 3′-terminal deoxythimidine (dT) nucleotide, a 2′-O-methyl modified nucleotide, a 2′-fluoro modified nucleotide, a 2′-deoxy-modified nucleotide, a locked nucleotide, an unlocked nucleotide, a conformationally restricted nucleotide, a constrained ethyl nucleotide, an abasic nucleotide, a 2′-amino-modified nucleotide, a 2′-O-allyl-modified nucleotide, 2′-C-alkyl-modified nucleotide, 2′-hydroxy-modified nucleotide, a 2′-methoxyethyl modified nucleotide, a 2′-O-alkyl-modified nucleotide, a morpholino nucleotide, a phosphoramidate, a non-natural base comprising nucleotide, a tetrahydropyran modified nucleotide, a 1,5-anhydrohexitol modified nucleotide, a cyclohexenyl modified nucleotide, a nucleotide comprising a 5′-phosphorothioate group, a nucleotide comprising a 5′-methylphosphonate group, a nucleotide comprising a 5′ phosphate or 5′ phosphate mimic, a nucleotide comprising vinyl phosphate, a nucleotide comprising adenosine-glycol nucleic acid (GNA), a nucleotide comprising thymidine-glycol nucleic acid (GNA) S-Isomer, a nucleotide comprising 2-hydroxymethyl-tetrahydrofuran-5-phosphate, a nucleotide comprising 2′-deoxythymidine-3′phosphate, a nucleotide comprising 2′-deoxyguanosine-3′-phosphate, or a terminal nucleotide linked to a cholesteryl derivative and a dodecanoic acid bisdecylamide group.

[0025] In another embodiment, the dsRNA agent includes at least one modified nucleotide that is a 2′-O-methyl modified nucleotide, a 2′-fluoro modified nucleotide, a 2′-C16 (2′-O-hexadecyl) modified nucleotide, or a nucleotide including vinyl phosphate. Optionally, the dsRNA agent includes at least one of each of the following modifications: 2′-O-methyl modified nucleotide, a 2′-fluoro modified nucleotide, a 2′-C16 (2′-O-hexadecyl) modified nucleotide, and a nucleotide including vinyl phosphate.

[0026] In certain embodiments, the dsRNA agent further includes a phosphate or phosphate mimic at the 5′-end of the antisense strand. Optionally, the phosphate mimic is a 5′-vinyl phosphonate (VP).

[0027] In some embodiments, the dsRNA agent includes a pattern of modified nucleotides as shown in Table 2 (where locations of 2′-C16, 2′-O-methyl, 2′-deoxy, GNA, phosphorothioate, vinyl phosphonate, and 2′-fluoro modifications are as displayed in Table 2, irrespective of the individual nucleotide base sequences of the displayed dsRNA agents).

[0028] In one embodiment, the dsRNA agent has a sense strand nucleotide sequence of AD-1804698, AD-1804699, AD-1747575, AD-1747576, AD-1804700, AD-1747577, AD-1747578, AD-1747579, AD-1747580, AD-1747581, AD-1804701, AD-1747582, AD-1804702, AD-1804703, AD-1804704, AD-1747583, AD-1804705, AD-1804706, AD-1804707, AD-1804708, AD-1804709, AD-1747591, AD-1747585, AD-1804710, AD-1804711, AD-1747586, AD-1804712, AD-1747587, AD-1804713, AD-1804714, AD-1747588, AD-1804715, AD-1804716, AD-1804717, AD-1804718, AD-1804719, AD-1804720, AD-1804721, AD-1804722, AD-1804723, AD-1804724, AD-1804725, or AD-1804726. Optionally, the dsRNA agent has a sense strand nucleotide sequence of AD-1747580, AD-1747583, or AD-1747585.

[0029] In certain embodiments, the sense strand of the dsRNA agent has one of the following modification patterns: 5′-nsnsnnn(Nhd)NfnNfNfNfnnnnnnnnsnsn-3′ or 5′-nsnsnnnnnnNfNfNfnnnn(Nhd)nnnsnsn-3′, where n is a 2′-O-methyl-nucleotide, s is a phosphorothioate internucleotide linkage, Nf is a 2′-fluoro-nucleotide, and (Nhd) is a 2′-O-hexadecyl-nucleotide.

[0030] In some embodiments, the antisense strand of the dsRNA agent has one of the following modification patterns: 5′-VPnsdNsnndNndNnnnndNnNfnnnnnnnsnsn-3′ or 5′-VPnsNfsnndNn(Ngn)nnnnnnNfnNfnnnnnsnsn-3′, where VP is Vinyl-phosphonate, n is a 2′-O-methyl-nucleotide, s is a phosphorothioate internucleotide linkage, dN is a 2′-deoxy-nucleotide, Nf is a 2′-fluoro-nucleotide, and (Ngn) is a glycol nucleic acid, S-isomer.

[0031] Another aspect of the instant disclosure provides a dsRNA agent for inhibiting expression of SNCA, where the dsRNA agent includes a sense strand having a 5′-terminus and a 3′-terminus and an antisense strand having a 5′-terminus and a 3′-terminus, where the sense strand and the antisense strand form a double stranded region, where: the sense strand includes a nucleotide sequence and modifications of Table 2 (SEQ ID NOs: 13-55), with 0 or 1 mismatches; and the antisense strand includes a nucleotide sequence and modifications of Table 2 (SEQ ID NOs: 56-98), with 0 or 1 mismatches.

[0032] In one embodiment, the dsRNA agent has one of the following sense strand nucleotide sequences: 5′-asasgug(Chd)ucAfGfUfuccaaugusgsa-3′ (SEQ ID NO: 35), 5′-uscsuuugcuCfCfCfaguu(Uhd)cuusgsa-3′ (SEQ ID NO: 28), 5′-gsasgca(Ahd)guGfAfCfaaauguugsgsa-3′ (SEQ ID NO: 21), 5′-gsusaca(Ahd)GfuGfCfUfcaguuccasasa-3′ (SEQ ID NO: 34), 5′-cscsauc(Ahd)gcAfGfUfgauugaagsusa-3′ (SEQ ID NO: 43), 5′-uscsccag(Uhd)uUfCfUfugagaucusgsa-3′ (SEQ ID NO: 261), or 5′-uscsaug(Ahd)aaGfGfAfcuuucaaasgsa-3′ (SEQ ID NO: 19), where a is a 2′-O-methyladenosine-3′-phosphate, u is a 2′-O-methyluridine-3′-phosphate, g is a 2′-O-methylguanosine-3′-phosphate, c is a 2′-O-methylcytidine-3′-phosphate, s is a phosphorothioate internucleotide linkage, Af is a 2′-fluoroadenosine-3′-phosphate, Gf is a 2′-fluoroguanosine-3′-phosphate, Uf is a 2′-fluorouridine-3′-phosphate, Cf is a 2′-fluorocytidine-3′-phosphate, (Ahd) is a 2′-O-hexadecyl adenosine-3′-phosphate, (Uhd) is a 2′-O-hexadecyl uridine-3′-phosphate, and (Chd) is a 2′-O-hexadecyl cytidine-3′-phosphate.

[0033] In another embodiment, the dsRNA agent has one of the following antisense strand nucleotide sequences: 5′-VPusdCsacdAudTggaadCuGfagcacuusgsu-3′ (SEQ ID NO: 78), 5′-VPusdCsaadGadAacugdGgAfgcaaagasusa-3′ (SEQ ID NO: 71), 5′-VPusdCscadAcdAuuugdTcAfcuugcucsusu-3′ (SEQ ID NO: 64), 5′-VPusUfsugdGa(Agn)cugagcAfcUfuguacsasg-3′ (SEQ ID NO: 77), 5′-VPusdAscudTcdAaucadCuGfcugauggsasa-3′ (SEQ ID NO: 86), 5′-VPusdCsagdAudCucaadGaAfacugggasgsc-3′ (SEQ ID NO: 262), or 5′-VPusdCsuudTgdAaagudCcUfuucaugasasu-3′ (SEQ ID NO: 62), where VP is Vinyl-phosphonate, a is a 2′-O-methyladenosine-3′-phosphate, u is a 2′-O-methyluridine-3′-phosphate, g is a 2′-O-methylguanosine-3′-phosphate, c is a 2′-O-methylcytidine-3′-phosphate, s is a phosphorothioate internucleotide linkage, Af is a 2′-fluoroadenosine-3′-phosphate, Gf is a 2′-fluoroguanosine-3′-phosphate, Uf is a 2′-fluorouridine-3′-phosphate, Cf is a 2′-fluorocytidine-3′-phosphate, dA is a 2′-deoxyadenosine-3′-phosphate, dC is a 2′-deoxycytidine-3′-phosphate, dG is a 2′-deoxyguanosine-3′-phosphate, dT is a 2′-deoxythymidine-3′-phosphate, and (Agn) is an Adenosine-glycol nucleic acid (GNA), S-isomer.

[0034] In a further embodiment, the dsRNA agent has one of the following duplex pairs of nucleotide sequences: (i) sense strand: 5′-asasgug(Chd)ucAfGfUfuccaaugusgsa-3′ (SEQ ID NO: 35) and antisense strand: 5′-VPusdCsacdAudTggaadCuGfagcacuusgsu-3′ (SEQ ID NO: 78); (ii) sense strand: 5′-uscsuuugcuCfCfCfaguu(Uhd)cuusgsa-3′ (SEQ ID NO: 28) and antisense strand: 5′-VPusdCsaadGadAacugdGgAfgcaaagasusa-3′ (SEQ ID NO: 71); (iii) sense strand: 5′-gsasgca(Ahd)guGfAfCfaaauguugsgsa-3′ (SEQ ID NO: 21) and antisense strand: 5′-VPusdCscadAcdAuuugdTcAfcuugcucsusu-3′ (SEQ ID NO: 64); (iv) sense strand: 5′-gsusaca(Ahd)GfuGfCfUfcaguuccasasa-3′ (SEQ ID NO: 34) and antisense strand: 5′-VPusUfsugdGa(Agn)cugagcAfcUfuguacsasg-3′ (SEQ ID NO: 77); (v) sense strand: 5′-cscsauc(Ahd)gcAfGfUfgauugaagsusa-3′ (SEQ ID NO: 43) and antisense strand: 5′-VPusdAscudTcdAaucadCuGfcugauggsasa-3′ (SEQ ID NO: 86); (vi) sense strand: 5′-uscsccag(Uhd)uUfCfUfugagaucusgsa-3′ (SEQ ID NO: 261) and antisense strand: 5′-VPusdCsagdAudCucaadGaAfacugggasgsc-3′ (SEQ ID NO: 262); or (vii) sense strand: 5′-uscsaug(Ahd)aaGfGfAfcuuucaaasgsa-3′ (SEQ ID NO: 19) and antisense strand: 5′-VPusdCsuudTgdAaagudCcUfuucaugasasu-3′ (SEQ ID NO: 62), where VP is Vinyl-phosphonate, a is a 2′-O-methyladenosine-3′-phosphate, u is a 2′-O-methyluridine-3′-phosphate, g is a 2′-O-methylguanosine-3′-phosphate, c is a 2′-O-methylcytidine-3′-phosphate, s is a phosphorothioate internucleotide linkage, Af is a 2′-fluoroadenosine-3′-phosphate, Gf is a 2′-fluoroguanosine-3′-phosphate, Uf is a 2′-fluorouridine-3′-phosphate, Cf is a 2′-fluorocytidine-3′-phosphate, dA is a 2′-deoxyadenosine-3′-phosphate, dC is a 2′-deoxycytidine-3′-phosphate, dG is a 2′-deoxyguanosine-3′-phosphate, dT is a 2′-deoxythymidine-3′-phosphate, (Agn) is an Adenosine-glycol nucleic acid (GNA), S-isomer, (Ahd) is a 2′-O-hexadecyl adenosine-3′-phosphate, (Uhd) is a 2′-O-hexadecyl uridine-3′-phosphate, and (Chd) is a 2′-O-hexadecyl cytidine-3′-phosphate.

[0035] An additional aspect of the instant disclosure provides a dsRNA agent for inhibiting expression of SNCA, the dsRNA agent having sense strand sequence 5′-asasgug(Chd)ucAfGfUfuccaaugusgsa-3′ (SEQ ID NO: 35) and antisense strand sequence 5′-VPusdCsacdAudTggaadCuGfagcacuusgsu-3′ (SEQ ID NO: 78), where VP is Vinyl-phosphonate, a is a 2′-O-methyladenosine-3′-phosphate, u is a 2′-O-methyluridine-3′-phosphate, g is a 2′-O-methylguanosine-3′-phosphate, c is a 2′-O-methylcytidine-3′-phosphate, s is a phosphorothioate internucleotide linkage, Af is a 2′-fluoroadenosine-3′-phosphate, Gf is a 2′-fluoroguanosine-3′-phosphate, Uf is a 2′-fluorouridine-3′-phosphate, dA is a 2′-deoxyadenosine-3′-phosphate, dC is a 2′-deoxycytidine-3′-phosphate, dT is a 2′-deoxythymidine-3′-phosphate, and (Chd) is a 2′-O-hexadecyl cytidine-3′-phosphate.

[0036] Another aspect of the instant disclosure provides a dsRNA agent for inhibiting expression of SNCA, the dsRNA agent having sense strand sequence 5′-uscsuuugcuCfCfCfaguu(Uhd)cuusgsa-3′ (SEQ ID NO: 28) and antisense strand sequence 5′-VPusdCsaadGadAacugdGgAfgcaaagasusa-3′ (SEQ ID NO: 71), where VP is Vinyl-phosphonate, a is a 2′-O-methyladenosine-3′-phosphate, u is a 2′-O-methyluridine-3′-phosphate, g is a 2′-O-methylguanosine-3′-phosphate, c is a 2′-O-methylcytidine-3′-phosphate, s is a phosphorothioate internucleotide linkage, Af is a 2′-fluoroadenosine-3′-phosphate, Cf is a 2′-fluorocytidine-3′-phosphate, dA is a 2′-deoxyadenosine-3′-phosphate, dC is a 2′-deoxycytidine-3′-phosphate, dG is a 2′-deoxyguanosine-3′-phosphate, and (Uhd) is a 2′-O-hexadecyl uridine-3′-phosphate.

[0037] A further aspect of the instant disclosure provides a dsRNA agent for inhibiting expression of SNCA, the dsRNA agent having sense strand sequence 5′-gsasgca(Ahd)guGfAfCfaaauguugsgsa-3′ (SEQ ID NO: 21) and antisense strand sequence 5′-VPusdCscadAcdAuuugdTcAfcuugcucsusu-3′ (SEQ ID NO: 64), where VP is Vinyl-phosphonate, a is a 2′-O-methyladenosine-3′-phosphate, u is a 2′-O-methyluridine-3′-phosphate, g is a 2′-O-methylguanosine-3′-phosphate, c is a 2′-O-methylcytidine-3′-phosphate, s is a phosphorothioate internucleotide linkage, Af is a 2′-fluoroadenosine-3′-phosphate, Gf is a 2′-fluoroguanosine-3′-phosphate, Cf is a 2′-fluorocytidine-3′-phosphate, dA is a 2′-deoxyadenosine-3′-phosphate, dC is a 2′-deoxycytidine-3′-phosphate, dT is a 2′-deoxythymidine-3′-phosphate, and (Ahd) is a 2′-O-hexadecyl adenosine-3′-phosphate.

[0038] In another embodiment, the RNAi agent is a pharmaceutically acceptable salt thereof. “Pharmaceutically acceptable salts” of each of the RNAi agents herein include, but are not limited to, a sodium salt, a calcium salt, a lithium salt, a potassium salt, an ammonium salt, a magnesium salt, and mixtures thereof. One skilled in the art will appreciate that the RNAi agent can be provided as a polycationic salt having one cation per free acid group of the optionally modified phosophodiester backbone and/or any other acidic modifications (e.g., 5′-terminal phosphonate groups). For example, an oligonucleotide of “n” nucleotides in length contains n−1 optionally modified phosophodiesters, so that an oligonucleotide of 21 nt in length may be provided as a salt having up to 20 cations (e.g., 20 sodium cations). Similarly, an RNAi agent having a sense strand of 21 nt in length and an antisense strand of 23 nt in length may be provided as a salt having up to 42 cations (e.g., 42 sodium cations). In the preceding example, where the RNAi agent also includes a 5′-terminal phosphate or a 5′-terminal vinylphosphonate group, the RNAi agent may be provided as a salt having up to 44 cations (e.g., 44 sodium cations).

[0039] Another aspect of the instant disclosure provides a cell containing a dsRNA agent disclosed herein.

[0040] An additional aspect of the instant disclosure provides a pharmaceutical composition for inhibiting expression of α-synuclein that includes a dsRNA agent disclosed herein.

[0041] In certain embodiments, the dsRNA agent and/or the pharmaceutical composition is administered in an unbuffered solution. Optionally, the unbuffered solution is saline or water.

[0042] In some embodiments, the dsRNA agent is administered with a buffer solution. Optionally, the buffer solution includes acetate, citrate, prolamine, carbonate, or phosphate, or a combination thereof. In certain embodiments, the buffer solution is phosphate buffered saline (PBS).

[0043] A further aspect of the instant disclosure provides a pharmaceutical composition that includes a dsRNA agent disclosed herein and a lipid formulation.

[0044] In one embodiment, the lipid formulation includes or is a lipid nanoparticle (LNP).

[0045] Another aspect of the instant disclosure provides a method of inhibiting expression of an α-synuclein (SNCA) gene in a cell, the method involving: (a) contacting the cell with a dRNA agent or pharmaceutical composition disclosed herein; and (b) maintaining the cell produced in step (a) for a time sufficient to obtain degradation of the mRNA transcript of an SNCA gene, thereby inhibiting expression of the SNCA gene in the cell.

[0046] In one embodiment, the cell is within a subject. Optionally, the subject is a human. Alternatively, the subject is a rhesus monkey, a cynomolgous monkey, a mouse, or a rat.

[0047] In certain embodiments, the human subject suffers from a SNCA-associated disease. Optionally, the SNCA-associated disease is a synucleinopathy. Optionally the synucleinopathy is PD, multiple system atrophy (MSA), Lewy body dementia (LBD), pure autonomic failure (PAF), Pick's disease, progressive supranuclear palsy, dementia pugilistica, parkinsonism linked to chromosome 17, Lytico-Bodig disease, tangle predominant dementia, Argyrophilic grain disease, ganglioglioma, gangliocytoma, meningioangiomatosis, subacute sclerosing panencephalitis, lead encephalopathy, tuberous sclerosis, Hallervorden-Spatz disease, lipofuscinosis, corticobasal degeneration, frontotemporal dementia, frontotemporal lobar degeneration, Alzheimer's disease, Huntington's disease, Down's syndrome, psychosis, schizophrenia and/or Creutzfeldt-Jakob disease.

[0048] In some embodiments, SNCA expression in the cell or the subject is inhibited by at least about 50%, at least about 40%, at least about 30%, at least about 20%, or at least about 10% by the dsRNA agent, as compared to a control cell or control subject.

[0049] An additional aspect of the instant disclosure provides a method of treating a subject diagnosed with a SNCA-associated neurodegenerative disease, the method involving administering to the subject a therapeutically effective amount of a dsRNA agent or pharmaceutical composition disclosed herein, thereby treating the subject.

[0050] In certain embodiments, treating includes amelioration of at least one sign or symptom of the SNCA-associated neurodegenerative disease.

[0051] In some embodiments, treating includes prevention of progression of the disease.

[0052] In one embodiment, the SNCA-associated neurodegenerative disease is characterized by one or more of the following symptoms: tremors, slowed movement (bradykinesia), rigid muscles, impaired posture and balance, loss of automatic movements, speech changes, writing changes, visual, auditory, olfactory, or tactile hallucinations, poor regulation of body functions (autonomic nervous systems) such as dizziness, falls and bowel issues, cognitive problems such as confusion, poor attention, visual-spatial problems and memory loss, sleep difficulties such as rapid eye movement (REM) sleep behavior disorder (in which dreams are physically acted out while asleep), fluctuating attention including episodes of drowsiness, long periods of staring into space, long naps during the day or disorganized speech, depression, and apathy, orthostatic hypotension (a sudden drop in blood pressure that occurs when a person stands up, causing a person to feel dizzy and lightheaded, and the need to sit, squat, or lie down in order to prevent fainting), clumsiness or incoordination, bladder control problems, contractures (chronic shortening of muscles or tendons around joints, which prevents the joints from moving freely) in the hands or limbs, Pisa syndrome (an abnormal posture in which the body appears to be leaning to one side), antecollis (in which the neck bends forward and the head drops down), and/or involuntary and uncontrollable sighing or gasping.

[0053] In certain embodiments, the dsRNA agent is administered to the subject at a dose of about 0.01 mg/kg to about 50 mg/kg.

[0054] In some embodiments, the dsRNA agent or pharmaceutical composition is administered to the subject intrathecally.

[0055] In one embodiment, the method further involves administering to the subject an additional agent or a therapy suitable for treatment or prevention of a SNCA-associated neurodegenerative disease or disorder.

[0056] In certain embodiments, the SNCA-associated neurodegenerative disease is Parkinson's Disease (PD).

[0057] In one embodiment, the SNCA-associated neurodegenerative disease is Lewy body dementia (LBD) or multiple system atrophy (MSA).

[0058] In some embodiments, SNCA expression is inhibited by at least about 30%.

[0059] In another embodiment, the method further involves administering an additional therapeutic agent to the subject.

[0060] In certain embodiments, the method reduces the expression of SNCA in a brain or spinal cord tissue. Optionally, the brain or spinal cord tissue is cerebral cortex, cerebellum, basal ganglia, hippocampus, amygdala, thalamus, brainstem, cervical spinal cord, lumbar spinal cord, and/or thoracic spinal cord.

[0061] Another aspect of the instant disclosure provides a method of inhibiting the expression of SNCA in a subject, the method involving administering to the subject a therapeutically effective amount of a dsRNA agent or the pharmaceutical composition disclosed herein, thereby inhibiting the expression of SNCA in the subject.

[0062] An additional aspect of the instant disclosure provides a method for treating or preventing an SNCA-associated disease in a subject, the method involving administering to the subject a therapeutically effective amount of a dsRNA agent or the pharmaceutical composition disclosed herein, thereby treating or preventing an SNCA-associated disease in the subject.

[0063] A further aspect of the instant disclosure provides a kit for performing a method disclosed herein, the kit including a dsRNA agent disclosed herein, and instructions for its use. Optionally, the kit also includes a means for administering the dsRNA agent to a subject.

### Definitions

[0064] That the present disclosure may be more readily understood, certain terms are first defined. In addition, it should be noted that whenever a value or range of values of a parameter are recited, it is intended that values and ranges intermediate to the recited values are also intended to be part of this disclosure.

[0065] The articles “a” and “an” are used herein to refer to one or to more than one (i.e., to at least one) of the grammatical object of the article. By way of example, “an element” means one element or more than one element, e.g., a plurality of elements.

[0066] The term “including” is used herein to mean, and is used interchangeably with, the phrase “including but not limited to”.

[0067] The term “or” is used herein to mean, and is used interchangeably with, the term “and/or,” unless context clearly indicates otherwise.

[0068] The term “about” is used herein to mean within the typical ranges of tolerances in the art. For example, “about” can be understood as about 2 standard deviations from the mean. In certain embodiments, about means ±10%. In certain embodiments, about means ±5%. When about is present before a series of numbers or a range, it is understood that “about” can modify each of the numbers in the series or range.

[0069] The term “at least” prior to a number or series of numbers is understood to include the number adjacent to the term “at least”, and all subsequent numbers or integers that could logically be included, as clear from context. For example, the number of nucleotides in a nucleic acid molecule must be an integer. For example, “at least 18 nucleotides of a 21 nucleotide nucleic acid molecule” means that 18, 19, 20, or 21 nucleotides have the indicated property. When at least is present before a series of numbers or a range, it is understood that “at least” can modify each of the numbers in the series or range.

[0070] As used herein, “no more than” or “less than” is understood as the value adjacent to the phrase and logical lower values or integers, as logical from context, to zero. For example, a duplex with an overhang of “no more than 2 nucleotides” has a 2, 1, or 0 nucleotide overhang. When “no more than” is present before a series of numbers or a range, it is understood that “no more than” can modify each of the numbers in the series or range. As used herein, ranges include both the upper and lower limit.

[0071] As used herein, methods of detection can include determination that the amount of analyte present is below the level of detection of the method.

[0072] In the event of a conflict between an indicated target site and the nucleotide sequence for a sense or antisense strand, the indicated sequence takes precedence.

[0073] In the event of a conflict between a chemical structure and a chemical name, the chemical structure takes precedence.

[0074] The term “SNCA,” “α-synuclein,” “synuclein alpha,” or “alphα-synuclein,” refers to a gene associated with neurodegenerative diseases, termed “synucleinopathies,” as well as the proteins encoded by that gene. The human SNCA gene region covers approximately 114 kb. The SNCA transcript contains 13 exons, and 15 mRNA isoforms have been identified or otherwise predicted as produced. Nucleotide and amino acid sequences of SNCA may be found, for example, at GenBank Accession No. NM_007308.3 (Homo sapiens SNCA, SEQ ID NO: 1, reverse complement, SEQ ID NO: 2); GenBank Accession No. XM_005555421 (Macaca fascicularis SNCA, SEQ ID NO: 3, reverse complement, SEQ ID NO: 4); GenBank Accession No.: NM_009221 (Mus musculus SNCA, SEQ ID NO: 5, reverse complement, SEQ ID NO: 6); GenBank Accession No. NM_019169.2 (Rattus norvegicus SNCA, SEQ ID NO: 7, reverse complement, SEQ ID NO: 8); and GenBank Accession No. XM_535656.7 (Canis lupus familiaris SNCA, SEQ ID NO: 228, reverse complement, SEQ ID NO: 229).

[0075] The term “SNCA” as used herein also refers to variations of the SNCA gene including naturally occurring sequence variants provided, for example, isoform 1 transcript NM_000345.4 (SEQ ID NO: 232), which encodes polypeptide NP_000336.1; isoform 2 transcript NM_001146054.2 (SEQ ID NO: 230), which encodes polypeptide NP_001139526.1; isoform 3 transcript NM_001146055.2 (SEQ ID NO: 231), which encodes polypeptide NP_001139527.1; isoform 4 transcript NM_007308.3 (SEQ ID NO: 1) as mentioned above, which encodes polypeptide NP_009292.1; isoform 5 transcript NM_001375285.1 (SEQ ID NO: 233), which encodes polypeptide NP_001362214.1; isoform 6 transcript NM_001375286.1 (SEQ ID NO: 234), which encodes polypeptide NP_001362215.1; isoform 7 transcript NM_001375287.1 (SEQ ID NO: 235), which encodes polypeptide NP_001362216.1; isoform 8 transcript NM_001375288.1 (SEQ ID NO: 236), which encodes polypeptide NP_001362217.1; isoform 9 transcript NM_001375290.1 (SEQ ID NO: 237), which encodes polypeptide NP_001362219.1; as well as predicted isoform X1 transcript XM_011532203.1 (SEQ ID NO: 238), which encodes polypeptide XP_011530505.1; predicted isoform X2 transcript XM_011532204.3 (SEQ ID NO: 239), which encodes polypeptide XP_011530506.1; predicted isoform X3 transcript XM_011532205.2 (SEQ ID NO: 240), which encodes polypeptide XP_011530507.1; predicted isoform X4 transcript XM_011532206.1 (SEQ ID NO: 241), which encodes polypeptide XP_011530508.1; predicted isoform X5 transcript XM_011532207.1 (SEQ ID NO: 242), which encodes polypeptide XP_011530509.1; and predicted isoform X8 transcript XM_017008563.1 (SEQ ID NO: 243), which encodes polypeptide XP_016864052.1 (the unique sequence associated with each of the preceding Accession Numbers is incorporated herein by reference in the form available on the filing date of the instant application). Additional examples of SNCA sequences can be found in publicly available databases, for example, GenBank, OMIM, UniProt, NCBI dbSNP (see, e.g., www.ncbi.nlm.nih.gov/gene/6622), and the Macaca genome project web site (macaque.genomics.org.cn/page/species/index.jsp). Additional information on SNCA can be found, for example, at www.ncbi.nlm.nih.gov/gene/6622. The entire contents of each of the foregoing GenBank Accession numbers and the Gene database numbers are incorporated herein by reference as of the date of filing this application.

[0076] Three protein isoforms of α-synuclein have been described in UniProt. The longest α-synuclein isoform is an approximately 14 kDa protein (Isoform 1 UniProt, P37840 of 140 amino acids). Other α-synuclein isoforms in UniProt include: Isoform 2-4, P37840-2 of 112 amino acids; and Isoform 2-5, P37840-3 of 126 amino acids. The 140 amino acid α-synuclein protein is encoded by 5 exon pairs mapping to chromosome loci 4q21.3-q22. The α-synuclein protein has an N-terminal region composed of incomplete KXKEGV (SEQ ID NO: 244) motifs, an extremely hydrophobic NAC domain and a highly acidic C-terminal domain. At physiological conditions, SNCA is believed to be an intrinsically disordered monomer or helically folded tetramer. α-Synuclein composes 1% of all proteins in the cytosol of brain cells, and is predominantly expressed in the neocortex, hippocampus, substantia nigra, thalamus, and cerebellum. α-Synuclein is also expressed in lower amounts in the heart, skeletal muscle, pancreas, lymph and blood cells. Although the function of SNCA is not well understood, evidence suggests it plays an important role in maintaining an adequate supply of synaptic vesicles in presynaptic terminals. α-Synuclein is implicated in the regulation of dopamine release and transport, fibrillization of microtubule associated protein tau, and the regulation of a neuroprotective phenotype in non-dopaminergic neurons by regulating the inhibition of both p53 expression and transactivation of proapoptotic genes, leading to decreased caspase-3 activation. The primary mechanism by which α-synuclein induces neurodegenerative diseases such as Parkinson's, Lewy body dementia, and multiple system atrophy, appears to be elevated levels of the α-synuclein protein resulting in α-synuclein fibrillary aggregates.

[0077] As used herein, “target sequence” refers to a contiguous portion of the nucleotide sequence of an mRNA molecule formed during the transcription of a SNCA gene, including mRNA that is a product of RNA processing of a primary transcription product. In one embodiment, the target portion of the sequence will be at least long enough to serve as a substrate for RNAi-directed cleavage at or near that portion of the nucleotide sequence of an mRNA molecule formed during the transcription of a SNCA gene. In one embodiment, the target sequence is within the protein coding region of the SNCA gene. In another embodiment, the target sequence is within the 3′ UTR of the SNCA gene.

[0078] The target sequence may be from about 9-36 nucleotides in length, e.g., about 15-30 nucleotides in length. For example, the target sequence can be from about 15-30 nucleotides, 15-29, 15-28, 15-27, 15-26, 15-25, 15-24, 15-23, 15-22, 15-21, 15-20, 15-19, 15-18, 15-17, 18-30, 18-29, 18-28, 18-27, 18-26, 18-25, 18-24, 18-23, 18-22, 18-21, 18-20, 19-30, 19-29, 19-28, 19-27, 19-26, 19-25, 19-24, 19-23, 19-22, 19-21, 19-20, 20-30, 20-29, 20-28, 20-27, 20-26, 20-25, 20-24,20-23, 20-22, 20-21, 21-30, 21-29, 21-28, 21-27, 21-26, 21-25, 21-24, 21-23, or 21-22 nucleotides in length. In some embodiments, the target sequence is about 19 to about 30 nucleotides in length. In other embodiments, the target sequence is about 19 to about 25 nucleotides in length. In still other embodiments, the target sequence is about 19 to about 23 nucleotides in length. In some embodiments, the target sequence is about 21 to about 23 nucleotides in length. Ranges and lengths intermediate to the above recited ranges and lengths are also contemplated to be part of the disclosure.

[0079] As used herein, the term “strand comprising a sequence” refers to an oligonucleotide comprising a chain of nucleotides that is described by the sequence referred to using the standard nucleotide nomenclature.

[0080] “G,” “C,” “A,” “T”, and “U” each generally stand for a nucleotide that contains guanine, cytosine, adenine, thymidine, and uracil as a base, respectively in the context of a modified or unmodified nucleotide. However, it will be understood that the term “ribonucleotide” or “nucleotide” can also refer to a modified nucleotide, as further detailed below, or a surrogate replacement moiety (see, e.g., Table 1). The skilled person is well aware that guanine, cytosine, adenine, thymidine, and uracil can be replaced by other moieties without substantially altering the base pairing properties of an oligonucleotide comprising a nucleotide bearing such replacement moiety. For example, without limitation, a nucleotide comprising inosine as its base can base pair with nucleotides containing adenine, cytosine, or uracil. Hence, nucleotides containing uracil, guanine, or adenine can be replaced in the nucleotide sequences of dsRNA featured in the disclosure by a nucleotide containing, for example, inosine. In another example, adenine and cytosine anywhere in the oligonucleotide can be replaced with guanine and uracil, respectively to form G-U Wobble base pairing with the target mRNA. Sequences containing such replacement moieties are suitable for the compositions and methods featured in the disclosure.

[0081] The terms “iRNA”, “RNAi agent,” “iRNA agent,” “RNA interference agent” as used interchangeably herein, refer to an agent that contains RNA as that term is defined herein, and which mediates the targeted cleavage of an RNA transcript via an RNA-induced silencing complex (RISC) pathway. RNA interference (RNAi) is a process that directs the sequence-specific degradation of mRNA. RNAi modulates, e.g., inhibits, the expression of SNCA in a cell, e.g., a cell within a subject, such as a mammalian subject.

[0082] In one embodiment, an RNAi agent of the disclosure includes a single stranded RNAi that interacts with a target RNA sequence, e.g., a SNCA target mRNA sequence, to direct the cleavage of the target RNA. Without wishing to be bound by theory it is believed that long double stranded RNA introduced into cells is broken down into double-stranded short interfering RNAs (siRNAs) comprising a sense strand and an antisense strand by a Type III endonuclease known as Dicer (Sharp et al. (2001) Genes Dev. 15: 485). Dicer, a ribonuclease-III-like enzyme, processes these dsRNA into 19-23 base pair short interfering RNAs with characteristic two base 3′ overhangs (Bernstein, et al., (2001) Nature 409: 363). These siRNAs are then incorporated into an RNA-induced silencing complex (RISC) where one or more helicases unwind the siRNA duplex, enabling the complementary antisense strand to guide target recognition (Nykanen, et al., (2001) Cell 107: 309). Upon binding to the appropriate target mRNA, one or more endonucleases within the RISC cleave the target to induce silencing (Elbashir, et al., (2001) Genes Dev. 15: 188). Thus, in one aspect the disclosure relates to a single stranded RNA (ssRNA) (the antisense strand of a siRNA duplex) generated within a cell and which promotes the formation of a RISC complex to effect silencing of the target gene, i.e., a SNCA gene. Accordingly, the term “siRNA” is also used herein to refer to an RNAi as described above.

[0083] In another embodiment, the RNAi agent may be a single-stranded RNA that is introduced into a cell or organism to inhibit a target mRNA. Single-stranded RNAi agents bind to the RISC endonuclease, Argonaute 2, which then cleaves the target mRNA. The single-stranded siRNAs are generally 15-30 nucleotides and are chemically modified. The design and testing of single-stranded RNAs are described in U.S. Pat. No. 8,101,348 and in Lima et al., (2012) Cell 150: 883-894, the entire contents of each of which are hereby incorporated herein by reference. Any of the antisense nucleotide sequences described herein may be used as a single-stranded siRNA as described herein or as chemically modified by the methods described in Lima et al., (2012) Cell 150: 883-894.

[0084] In another embodiment, a “RNAi agent” for use in the compositions and methods of the disclosure is a double stranded RNA and is referred to herein as a “double stranded RNAi agent,” “double stranded RNA (dsRNA) molecule,” “dsRNA agent,” or “dsRNA”. The term “dsRNA” refers to a complex of ribonucleic acid molecules, having a duplex structure comprising two anti-parallel and substantially complementary nucleic acid strands, referred to as having “sense” and “antisense” orientations with respect to a target RNA, i.e., a SNCA gene. In some embodiments of the disclosure, a double stranded RNA (dsRNA) triggers the degradation of a target RNA, e.g., an mRNA, through a post-transcriptional gene-silencing mechanism referred to herein as RNA interference or RNAi.

[0085] In general, a dsRNA molecule can include ribonucleotides, but as described in detail herein, each or both strands can also include one or more non-ribonucleotides, e.g., a deoxyribonucleotide, a modified nucleotide. In addition, as used in this specification, an “RNAi agent” may include ribonucleotides with chemical modifications; an RNAi agent may include substantial modifications at multiple nucleotides.

[0086] As used herein, the term “modified nucleotide” refers to a nucleotide having, independently, a modified sugar moiety, a modified internucleotide linkage, or a modified nucleobase. Thus, the term modified nucleotide encompasses substitutions, additions or removal of, e.g., a functional group or atom, to internucleoside linkages, sugar moieties, or nucleobases. The modifications suitable for use in the agents of the disclosure include all types of modifications disclosed herein or known in the art. Any such modifications, as used in a siRNA type molecule, are encompassed by “RNAi agent” for the purposes of this specification and claims.

[0087] In certain embodiments of the instant disclosure, inclusion of a deoxy-nucleotide—which is acknowledged as a naturally occurring form of nucleotide—if present within an RNAi agent can be considered to constitute a modified nucleotide.

[0088] The duplex region may be of any length that permits specific degradation of a desired target RNA through a RISC pathway, and may range from about 9 to 36 base pairs in length, e.g., about 15-30 base pairs in length, for example, about 9, 10, 11, 12, 13, 14, 15, 16, 17, 18, 19, 20, 21, 22, 23, 24, 25, 26, 27, 28, 29, 30, 31, 32, 33, 34, 35, or 36 base pairs in length, such as about 15-30, 15-29, 15-28, 15-27, 15-26, 15-25, 15-24, 15-23, 15-22, 15-21, 15-20, 15-19, 15-18, 15-17, 18-30, 18-29, 18-28, 18-27, 18-26, 18-25, 18-24, 18-23, 18-22, 18-21, 18-20, 19-30, 19-29, 19-28, 19-27, 19-26, 19-25, 19-24, 19-23, 19-22, 19-21, 19-20, 20-30, 20-29, 20-28, 20-27, 20-26, 20-25, 20-24,20-23, 20-22, 20-21, 21-30, 21-29, 21-28, 21-27, 21-26, 21-25, 21-24, 21-23, or 21-22 base pairs in length. Ranges and lengths intermediate to the above recited ranges and lengths are also contemplated to be part of the invention.

[0089] The two strands forming the duplex structure may be different portions of one larger RNA molecule, or they may be separate RNA molecules. Where the two strands are part of one larger molecule, and therefore are connected by an uninterrupted chain of nucleotides between the 3′-end of one strand and the 5′-end of the respective other strand forming the duplex structure, the connecting RNA chain is referred to as a “hairpin loop.” A hairpin loop can comprise at least one unpaired nucleotide. In some embodiments, the hairpin loop can comprise at at least 4, at least 5, at least 6, at least 7, at least 8, at least 9, at least 10, at least 20, at least 23 or more unpaired nucleotides or nucleotides not directed to the target site of the dsRNA. In some embodiments, the hairpin loop can be 10 or fewer nucleotides. In some embodiments, the hairpin loop can be 8 or fewer unpaired nucleotides. In some embodiments, the hairpin loop can be 4-10 unpaired nucleotides. In some embodiments, the hairpin loop can be 4-8 nucleotides.

[0090] In certain embodiments, the two strands of double-stranded oligomeric compound can be linked together. The two strands can be linked to each other at both ends, or at one end only. By linking at one end is meant that 5′-end of first strand is linked to the 3′-end of the second strand or 3′-end of first strand is linked to 5′-end of the second strand. When the two strands are linked to each other at both ends, 5′-end of first strand is linked to 3′-end of second strand and 3′-end of first strand is linked to 5′-end of second strand. The two strands can be linked together by an oligonucleotide linker including, but not limited to, (N)n; wherein N is independently a modified or unmodified nucleotide and n is 3-23. In some embodiments, n is 3-10, e.g., 3, 4, 5, 6, 7, 8, 9, or 10. In some embodiments, the oligonucleotide linker is selected from the group consisting of GNRA, (G)4, (U)4, and (dT)4, wherein N is a modified or unmodified nucleotide and R is a modified or unmodified purine nucleotide. Some of the nucleotides in the linker can be involved in base-pair interactions with other nucleotides in the linker. The two strands can also be linked together by a non-nucleosidic linker, e.g., a linker described herein. It will be appreciated by one of skill in the art that any oligonucleotide chemical modifications or variations describe herein can be used in the oligonucleotide linker.

[0091] Hairpin and dumbbell type oligomeric compounds will have a duplex region equal to or at least 14, 15, 15, 16, 17, 18, 19, 29, 21, 22, 23, 24, or 25 nucleotide pairs. The duplex region can be equal to or less than 200, 100, or 50, in length. In some embodiments, ranges for the duplex region are 15-30, 17 to 23, 19 to 23, and 19 to 21 nucleotides pairs in length.

[0092] The hairpin oligomeric compounds can have a single strand overhang or terminal unpaired region, in some embodiments at the 3′, and in some embodiments on the antisense side of the hairpin. In some embodiments, the overhangs are 1-4, more generally 2-3 nucleotides in length. The hairpin oligomeric compounds that can induce RNA interference are also referred to as “shRNA” herein.

[0093] Where the two substantially complementary strands of a dsRNA are comprised by separate RNA molecules, those molecules need not, but can be covalently connected. Where the two strands are connected covalently by means other than an uninterrupted chain of nucleotides between the 3′-end of one strand and the 5′-end of the respective other strand forming the duplex structure, the connecting structure is referred to as a “linker.” The RNA strands may have the same or a different number of nucleotides. The maximum number of base pairs is the number of nucleotides in the shortest strand of the dsRNA minus any overhangs that are present in the duplex. In addition to the duplex structure, an RNAi may comprise one or more nucleotide overhangs.

[0094] In one embodiment, an RNAi agent of the disclosure is a dsRNA, each strand of which is 24-30 nucleotides in length, that interacts with a target RNA sequence, e.g., a SNCA target mRNA sequence, to direct the cleavage of the target RNA. Without wishing to be bound by theory, long double stranded RNA introduced into cells is broken down into siRNA by a Type III endonuclease known as Dicer (Sharp et al. (2001) Genes Dev. 15: 485). Dicer, a ribonuclease-III-like enzyme, processes the dsRNA into 19-23 base pair short interfering RNAs with characteristic two base 3′ overhangs (Bernstein, et al., (2001) Nature 409: 363). The siRNAs are then incorporated into an RNA-induced silencing complex (RISC) where one or more helicases unwind the siRNA duplex, enabling the complementary antisense strand to guide target recognition (Nykanen, et al., (2001) Cell 107: 309). Upon binding to the appropriate target mRNA, one or more endonucleases within the RISC cleave the target to induce silencing (Elbashir, et al., (2001) Genes Dev. 15: 188).

[0095] In one embodiment, an RNAi agent of the disclosure is a dsRNA agent, each strand of which comprises 19-23 nucleotides that interacts with a SNCA RNA sequence to direct the cleavage of the target RNA. Without wishing to be bound by theory, long double stranded RNA introduced into cells is broken down into siRNA by a Type III endonuclease known as Dicer (Sharp et al. (2001) Genes Dev. 15: 485). Dicer, a ribonuclease-III-like enzyme, processes the dsRNA into 19-23 base pair short interfering RNAs with characteristic two base 3′ overhangs (Bernstein, et al., (2001) Nature 409: 363). The siRNAs are then incorporated into an RNA-induced silencing complex (RISC) where one or more helicases unwind the siRNA duplex, enabling the complementary antisense strand to guide target recognition (Nykanen, et al., (2001) Cell 107: 309). Upon binding to the appropriate target mRNA, one or more endonucleases within the RISC cleave the target to induce silencing (Elbashir, et al., (2001) Genes Dev. 15: 188). In one embodiment, an RNAi agent of the disclosure is a dsRNA of 24-30 nucleotides that interacts with a SNCA RNA sequence to direct the cleavage of the target RNA.

[0096] As used herein, the term “nucleotide overhang” refers to at least one unpaired nucleotide that protrudes from the duplex structure of an RNAi agent, e.g., a dsRNA. For example, when a 3′-end of one strand of a dsRNA extends beyond the 5′-end of the other strand, or vice versa, there is a nucleotide overhang. A dsRNA can comprise an overhang of at least one nucleotide; alternatively, the overhang can comprise at least two nucleotides, at least three nucleotides, at least four nucleotides, at least five nucleotides or more. A nucleotide overhang can comprise or consist of a nucleotide/nucleoside analog, including a deoxynucleotide/nucleoside. The overhang(s) can be on the sense strand, the antisense strand or any combination thereof. Furthermore, the nucleotide(s) of an overhang can be present on the 5′-end, 3′-end or both ends of either an antisense or sense strand of a dsRNA.

[0097] In one embodiment of the dsRNA, at least one strand comprises a 3′ overhang of at least 1 nucleotide. In another embodiment, at least one strand comprises a 3′ overhang of at least 2 nucleotides, e.g., 2, 3, 4, 5, 6, 7, 9, 10, 11, 12, 13, 14, or 15 nucleotides. In other embodiments, at least one strand of the RNAi agent comprises a 5′ overhang of at least 1 nucleotide. In certain embodiments, at least one strand comprises a 5′ overhang of at least 2 nucleotides, e.g., 2, 3, 4, 5, 6, 7, 9, 10, 11, 12, 13, 14, or 15 nucleotides. In still other embodiments, both the 3′ and the 5′ end of one strand of the RNAi agent comprise an overhang of at least 1 nucleotide.

[0098] In one embodiment, the antisense strand of a dsRNA has a 1-10 nucleotide, e.g., 0-3, 1-3, 2-4, 2-5, 4-10, 5-10, e.g., a 1, 2, 3, 4, 5, 6, 7, 8, 9, or 10 nucleotide, overhang at the 3′-end, the 5′-end, at both ends, or at neither end. In one embodiment, the sense strand of a dsRNA has a 1-10 nucleotide, e.g., a 1, 2, 3, 4, 5, 6, 7, 8, 9, or 10 nucleotide, overhang at the 3′-end, the 5′-end, at both ends, or at neither end. In another embodiment, one or more of the nucleotides in the overhang is replaced with a nucleoside thiophosphate.

[0099] In certain embodiments, the overhang on the sense strand or the antisense strand, or both, can include extended lengths longer than 10 nucleotides, e.g., 1-30 nucleotides, 2-30 nucleotides, 10-30 nucleotides, or 10-15 nucleotides in length. In certain embodiments, an extended overhang is on the sense strand of the duplex. In certain embodiments, an extended overhang is present on the 3′end of the sense strand of the duplex. In certain embodiments, an extended overhang is present on the 5′end of the sense strand of the duplex. In certain embodiments, an extended overhang is on the antisense strand of the duplex. In certain embodiments, an extended overhang is present on the 3′end of the antisense strand of the duplex. In certain embodiments, an extended overhang is present on the 5′end of the antisense strand of the duplex. In certain embodiments, one or more of the nucleotides in the overhang is replaced with a nucleoside thiophosphate. In certain embodiments, the overhang includes a self-complementary portion such that the overhang is capable of forming a hairpin structure that is stable under physiological conditions.

[0100] The terms “blunt” or “blunt ended” as used herein in reference to a dsRNA mean that there are no unpaired nucleotides or nucleotide analogs at a given terminal end of a dsRNA, i.e., no nucleotide overhang. One or both ends of a dsRNA can be blunt. Where both ends of a dsRNA are blunt, the dsRNA is said to be blunt ended. To be clear, a “blunt ended” dsRNA is a dsRNA that is blunt at both ends, i.e., no nucleotide overhang at either end of the molecule. Most often such a molecule will be double stranded over its entire length.

[0101] The term “antisense strand” or “guide strand” refers to the strand of an RNAi agent, e.g., a dsRNA, which includes a region that is substantially complementary to a target sequence, e.g., a SNCA mRNA.

[0102] As used herein, the term “region of complementarity” refers to the region on the antisense strand that is substantially complementary to a sequence, for example a target sequence, e.g., a SNCA nucleotide sequence, as defined herein. Where the region of complementarity is not fully complementary to the target sequence, the mismatches can be in the internal or terminal regions of the molecule. Generally, the most tolerated mismatches are in the terminal regions, e.g., within 5, 4, 3, or 2 nucleotides of the 5′- or 3′-terminus of the RNAi agent.

[0103] In some embodiments, a double stranded RNA agent of the disclosure includes a nucleotide mismatch in the antisense strand.

[0104] In some embodiments, the antisense strand of the double stranded RNA agent of the disclosure includes no more than 4 mismatches with the target mRNA, e.g., the antisense strand includes 4, 3, 2, 1, or 0 mismatches with the target mRNA. In some embodiments, the antisense strand double stranded RNA agent of the disclosure includes no more than 4 mismatches with the sense strand, e.g., the antisense strand includes 4, 3, 2, 1, or 0 mismatches with the sense strand. In some embodiments, a double stranded RNA agent of the disclosure includes a nucleotide mismatch in the sense strand. In some embodiments, the sense strand of the double stranded RNA agent of the invention includes no more than 4 mismatches with the antisense strand, e.g., the sense strand includes 4, 3, 2, 1, or 0 mismatches with the antisense strand. In some embodiments, the nucleotide mismatch is, for example, within 5, 4, 3 nucleotides from the 3′-end of the iRNA. In another embodiment, the nucleotide mismatch is, for example, in the 3′-terminal nucleotide of the iRNA agent. In some embodiments, the mismatch(s) is not in the seed region.

[0105] Thus, an RNAi agent as described herein can contain one or more mismatches to the target sequence. In one embodiment, an RNAi agent as described herein contains no more than 3 mismatches (i.e., 3, 2, 1, or 0 mismatches). In one embodiment, an RNAi agent as described herein contains no more than 2 mismatches. In one embodiment, an RNAi agent as described herein contains no more than 1 mismatch. In one embodiment, an RNAi agent as described herein contains 0 mismatches. In certain embodiments, if the antisense strand of the RNAi agent contains mismatches to the target sequence, the mismatch can optionally be restricted to be within the last 5 nucleotides from either the 5′- or 3′-end of the region of complementarity. For example, in such embodiments, for a 23 nucleotide RNAi agent, the strand which is complementary to a region of a SNCA gene, generally does not contain any mismatch within the central 13 nucleotides. The methods described herein, or methods known in the art can be used to determine whether an RNAi agent containing a mismatch to a target sequence is effective in inhibiting the expression of a SNCA gene. Consideration of the efficacy of RNAi agents with mismatches in inhibiting expression of a SNCA gene is important, especially if the particular region of complementarity in a SNCA gene is known to have polymorphic sequence variation within the population.

[0106] The term “sense strand” or “passenger strand” as used herein, refers to the strand of an RNAi agent that includes a region that is substantially complementary to a region of the antisense strand as that term is defined herein.

[0107] As used herein, “substantially all of the nucleotides are modified” are largely but not wholly modified and can include not more than 5, 4, 3, 2, or 1 unmodified nucleotides.

[0108] As used herein, the term “cleavage region” refers to a region that is located immediately adjacent to the cleavage site. The cleavage site is the site on the target at which cleavage occurs. In some embodiments, the cleavage region comprises three bases on either end of, and immediately adjacent to, the cleavage site. In some embodiments, the cleavage region comprises two bases on either end of, and immediately adjacent to, the cleavage site. In some embodiments, the cleavage site specifically occurs at the site bound by nucleotides 10 and 11 of the antisense strand, and the cleavage region comprises nucleotides 11, 12 and 13.

[0109] As used herein, and unless otherwise indicated, the term “complementary,” when used to describe a first nucleotide sequence in relation to a second nucleotide sequence, refers to the ability of an oligonucleotide or polynucleotide comprising the first nucleotide sequence to hybridize and form a duplex structure under certain conditions with an oligonucleotide or polynucleotide comprising the second nucleotide sequence, as will be understood by the skilled person. Such conditions can, for example, be stringent conditions, where stringent conditions can include: 400 mM NaCl, 40 mM PIPES pH 6.4, 1 mM EDTA, 50° C. or 70° C. for 12-16 hours followed by washing (see, e.g., “Molecular Cloning: A Laboratory Manual, Sambrook, et al. (1989) Cold Spring Harbor Laboratory Press). Other conditions, such as physiologically relevant conditions as can be encountered inside an organism, can apply. The skilled person will be able to determine the set of conditions most appropriate for a test of complementarity of two sequences in accordance with the ultimate application of the hybridized nucleotides.

[0110] Complementary sequences within an RNAi agent, e.g., within a dsRNA as described herein, include base-pairing of the oligonucleotide or polynucleotide comprising a first nucleotide sequence to an oligonucleotide or polynucleotide comprising a second nucleotide sequence over the entire length of one or both nucleotide sequences. Such sequences can be referred to as “fully complementary” with respect to each other herein. However, where a first sequence is referred to as “substantially complementary” with respect to a second sequence herein, the two sequences can be fully complementary, or they can form one or more, but generally not more than 5, 4, 3 or 2 mismatched base pairs upon hybridization for a duplex up to 30 base pairs, while retaining the ability to hybridize under the conditions most relevant to their ultimate application, e.g., inhibition of gene expression via a RISC pathway. However, where two oligonucleotides are designed to form, upon hybridization, one or more single stranded overhangs, such overhangs shall not be regarded as mismatches with regard to the determination of complementarity. For example, a dsRNA comprising one oligonucleotide 21 nucleotides in length and another oligonucleotide 23 nucleotides in length, wherein the longer oligonucleotide comprises a sequence of 21 nucleotides that is fully complementary to the shorter oligonucleotide, can yet be referred to as “fully complementary” for the purposes described herein.

[0111] “Complementary” sequences, as used herein, can also include, or be formed entirely from, non-Watson-Crick base pairs or base pairs formed from non-natural and modified nucleotides, in so far as the above requirements with respect to their ability to hybridize are fulfilled. Such non-Watson-Crick base pairs include, but are not limited to, G:U Wobble or Hoogstein base pairing.

[0112] The terms “complementary,” “fully complementary” and “substantially complementary” herein can be used with respect to the base matching between the sense strand and the antisense strand of a dsRNA, or between the antisense strand of an RNAi agent and a target sequence, as will be understood from the context of their use.

[0113] As used herein, a polynucleotide that is “substantially complementary to at least part of” a messenger RNA (mRNA) refers to a polynucleotide that is substantially complementary to a contiguous portion of the mRNA of interest (e.g., an mRNA encoding SNCA). For example, a polynucleotide is complementary to at least a part of a SNCA mRNA if the sequence is substantially complementary to a non-interrupted portion of an mRNA encoding SNCA.

[0114] Accordingly, in some embodiments, the antisense strand polynucleotides disclosed herein are fully complementary to the target SNCA sequence.

[0115] In certain embodiments, the antisense strand polynucleotides disclosed herein are substantially complementary to the target SNCA sequence and comprise a contiguous nucleotide sequence which is at least about 80% complementary over its entire length to the equivalent region of the nucleotide sequence of SEQ ID NOs: 1, 3, 5, 7, or 228 for SNCA, or a fragment of SEQ ID NOs: 1, 3, 5, 7, or 228, such as about 85%, about 86%, about 87%, about 88%, about 89%, about 90%, about 91%, about 92%, about 93%, about 94%, about 95%, about 96%, about 97%, about 98%, or about 99% complementary.

[0116] In other embodiments, the antisense polynucleotides disclosed herein are substantially complementary to the target SNCA sequence and comprise a contiguous nucleotide sequence which is at least about 80% complementary over its entire length to any one of the sense strand nucleotide sequences in Tables 2 or 3, or a fragment of any one of the sense strand nucleotide sequences in Tables 2 or 3, such as about 85%, about 86%, about 87%, about 88%, about 89%, about 90%, about 91%, about 92%, about 93%, about 94%, about 95%, about 96%, about 97%, about 98%, or about 99% complementary.

[0117] In one embodiment, an RNAi agent of the disclosure includes a sense strand that is substantially complementary to an antisense polynucleotide which, in turn, is the same as a target SNCA sequence, and wherein the sense strand polynucleotide comprises a contiguous nucleotide sequence which is at least about 80% complementary over its entire length to the equivalent region of the nucleotide sequence of SEQ ID NOs: 2, 4, 6, 8, or 229, or a fragment of any one of SEQ ID NOs: 2, 4, 6, 8, or 229, such as about 85%, about 86%, about 87%, about 88%, about 89%, about 90%, about 91%, about 92%, about 93%, about 94%, about 95%, about 96%, about 97%, about 98%, or about 99% complementary.

[0118] In some embodiments, an iRNA of the disclosure includes a sense strand that is substantially complementary to an antisense polynucleotide which, in turn, is complementary to a target SNCA sequence, and wherein the sense strand polynucleotide comprises a contiguous nucleotide sequence which is at least about 80% complementary over its entire length to any one of the antisense strand nucleotide sequences in Tables 2 or 3, or a fragment of any one of the antisense strand nucleotide sequences in Tables 2 or 3, such as about 85%, about 90%, about 91%, about 92%, about 93%, about 94%, about 95%, about 96%, about 97%, about 98%, about 99%, or 100% complementary

[0119] In some embodiments, the double-stranded region of a double-stranded iRNA agent is equal to or at least, 10, 11, 12, 13, 14, 15, 16, 17, 18, 19, 20, 21, 22, 23, 23, 24, 25, 26, 27, 28, 29, 30 or more nucleotide pairs in length.

[0120] In some embodiments, the antisense strand of a double-stranded iRNA agent is equal to or at least 14, 15, 16, 17, 18, 19, 20, 21, 22, 23, 23, 24, 25, 26, 27, 28, 29, or 30 nucleotides in length.

[0121] In some embodiments, the sense strand of a double-stranded iRNA agent is equal to or at least 10, 11, 12, 13, 14, 15, 16, 17, 18, 19, 20, 21, 22, 23, 23, 24, 25, 26, 27, 28, 29, or 30 nucleotides in length.

[0122] In one embodiment, the sense and antisense strands of the double-stranded iRNA agent are each 15 to 30 nucleotides in length.

[0123] In one embodiment, the sense and antisense strands of the double-stranded iRNA agent are each 19 to 25 nucleotides in length.

[0124] In one embodiment, the sense and antisense strands of the double-stranded iRNA agent are each 21 to 23 nucleotides in length.

[0125] In one embodiment, the sense strand of the iRNA agent is 21-nucleotides in length, and the antisense strand is 23-nucleotides in length, wherein the strands form a double-stranded region of 21 consecutive base pairs having a 2-nucleotide long single stranded overhangs at the 3′-end.

[0126] In some embodiments, the majority of nucleotides of each strand are ribonucleotides, but as described in detail herein, each or both strands can also include one or more non-ribonucleotides, e.g., a deoxyribonucleotide or a modified nucleotide. In addition, an “iRNA” may include ribonucleotides with chemical modifications. Such modifications may include all types of modifications disclosed herein or known in the art. Any such modifications, as used in an iRNA molecule, are encompassed by “iRNA” for the purposes of this specification and claims.

[0127] In one aspect of the disclosure, an agent for use in the methods and compositions of the disclosure is a single-stranded antisense nucleic acid molecule that inhibits a target mRNA via an antisense inhibition mechanism. The single-stranded antisense RNA molecule is complementary to a sequence within the target mRNA. The single-stranded antisense oligonucleotides can inhibit translation in a stoichiometric manner by base pairing to the mRNA and physically obstructing the translation machinery, see Dias, N. et al., (2002) Mol Cancer Ther 1: 347-355. The single-stranded antisense RNA molecule may be about 15 to about 30 nucleotides in length and have a sequence that is complementary to a target sequence. For example, the single-stranded antisense RNA molecule may comprise a sequence that is at least about 15, 16, 17, 18, 19, 20, or more contiguous nucleotides from any one of the antisense sequences described herein.

[0128] In one embodiment, at least partial suppression of the expression of a SNCA gene, is assessed by a reduction of the amount of SNCA mRNA which can be isolated from or detected in a first cell or group of cells in which a SNCA gene is transcribed and which has or have been treated such that the expression of a SNCA gene is inhibited, as compared to a second cell or group of cells substantially identical to the first cell or group of cells but which has or have not been so treated (control cells). The degree of inhibition may be expressed in terms of:

$$\frac{( mRNA in control cells ) - ( mRNA in treated cells )}{( mRNA in control cells )} \cdot 100 \%$$

[0129] The phrase “contacting a cell with an RNAi agent,” such as a dsRNA, as used herein, includes contacting a cell by any possible means. Contacting a cell with an RNAi agent includes contacting a cell in vitro with the RNAi agent or contacting a cell in vivo with the RNAi agent. The contacting may be done directly or indirectly. Thus, for example, the RNAi agent may be put into physical contact with the cell by the individual performing the method, or alternatively, the RNAi agent may be put into a situation that will permit or cause it to subsequently come into contact with the cell.

[0130] Contacting a cell in vitro may be done, for example, by incubating the cell with the RNAi agent. Contacting a cell in vivo may be done, for example, by injecting the RNAi agent into or near the tissue where the cell is located, or by injecting the RNAi agent into another area, e.g., the central nervous system (CNS), optionally via intrathecal, intravitreal or other injection, or to the bloodstream or the subcutaneous space, such that the agent will subsequently reach the tissue where the cell to be contacted is located. For example, the RNAi agent may contain or be coupled to a ligand, e.g., a lipophilic moiety or moieties as described below and further detailed, e.g., in PCT/US2019/031170, which is incorporated herein by reference, that directs or otherwise stabilizes the RNAi agent at a site of interest, e.g., the CNS. In some embodiments, the RNAi agent may contain or be coupled to a lipophilic moiety or moieties, optionally in the absence of GalNAc derivatives. Combinations of in vitro and in vivo methods of contacting are also possible. For example, a cell may also be contacted in vitro with an RNAi agent and subsequently transplanted into a subject.

[0131] In one embodiment, contacting a cell with an RNAi agent includes “introducing” or “delivering the RNAi agent into the cell” by facilitating or effecting uptake or absorption into the cell. Absorption or uptake of an RNAi agent can occur through unaided diffusive or active cellular processes, or by auxiliary agents or devices. Introducing an RNAi agent into a cell may be in vitro or in vivo. For example, for in vivo introduction, an RNAi agent can be injected into a tissue site or administered systemically. In vitro introduction into a cell includes methods known in the art such as electroporation and lipofection. Further approaches are described herein below or are known in the art.

[0132] The term “lipophile” or “lipophilic moiety” broadly refers to any compound or chemical moiety having an affinity for lipids. One way to characterize the lipophilicity of the lipophilic moiety is by the octanol-water partition coefficient, log K_{ow}, where K_{ow} is the ratio of a chemical's concentration in the octanol-phase to its concentration in the aqueous phase of a two-phase system at equilibrium. The octanol-water partition coefficient is a laboratory-measured property of a substance. However, it may also be predicted by using coefficients attributed to the structural components of a chemical which are calculated using first-principle or empirical methods (see, for example, Tetko et al., J. Chem. Inf. Comput. Sci. 41: 1407-21 (2001), which is incorporated herein by reference in its entirety). It provides a thermodynamic measure of the tendency of the substance to prefer a non-aqueous or oily milieu rather than water (i.e. its hydrophilic/lipophilic balance). In principle, a chemical substance is lipophilic in character when its log K_{ow} exceeds 0. Typically, the lipophilic moiety possesses a log K_{ow} exceeding 1, exceeding 1.5, exceeding 2, exceeding 3, exceeding 4, exceeding 5, or exceeding 10. For instance, the log K_{ow} of 6-amino hexanol, for instance, is predicted to be approximately 0.7. Using the same method, the log K_{ow} of cholesteryl N-(hexan-6-ol) carbamate is predicted to be 10.7.

[0133] The lipophilicity of a molecule can change with respect to the functional group it carries. For instance, adding a hydroxyl group or amine group to the end of a lipophilic moiety can increase or decrease the partition coefficient (e.g., log K_{ow}) value of the lipophilic moiety.

[0134] Alternatively, the hydrophobicity of the double-stranded RNAi agent, conjugated to one or more lipophilic moieties, can be measured by its protein binding characteristics. For instance, in certain embodiments, the unbound fraction in the plasma protein binding assay of the double-stranded RNAi agent could be determined to positively correlate to the relative hydrophobicity of the double-stranded RNAi agent, which could then positively correlate to the silencing activity of the double-stranded RNAi agent.

[0135] In one embodiment, the plasma protein binding assay determined is an electrophoretic mobility shift assay (EMSA) using human serum albumin protein. An exemplary protocol of this binding assay is illustrated in detail in, e.g., PCT/US2019/031170. The hydrophobicity of the double-stranded RNAi agent, measured by fraction of unbound siRNA in the binding assay, exceeds 0.15, exceeds 0.2, exceeds 0.25, exceeds 0.3, exceeds 0.35, exceeds 0.4, exceeds 0.45, or exceeds 0.5 for an enhanced in vivo delivery of siRNA.

[0136] Accordingly, conjugating the lipophilic moieties to the internal position(s) of the double-stranded RNAi agent provides optimal hydrophobicity for the enhanced in vivo delivery of siRNA.

[0137] The term “lipid nanoparticle” or “LNP” refers to a vesicle comprising a lipid layer encapsulating a pharmaceutically active molecule, such as a nucleic acid molecule, e.g., an RNAi agent or a plasmid from which an RNAi agent is transcribed. LNPs are described in, for example, U.S. Pat. Nos. 6,858,225, 6,815,432, 8,158,601, and 8,058,069, the entire contents of which are hereby incorporated herein by reference.

[0138] As used herein, a “subject” is an animal, such as a mammal, including a primate (such as a human, a non-human primate, e.g., a monkey, and a chimpanzee), or a non-primate (such as a a rat, or a mouse). In a preferred embodiment, the subject is a human, such as a human being treated or assessed for a disease, disorder, or condition that would benefit from reduction in SNCA expression; a human at risk for a disease, disorder, or condition that would benefit from reduction in SNCA expression; a human having a disease, disorder, or condition that would benefit from reduction in SNCA expression; or human being treated for a disease, disorder, or condition that would benefit from reduction in SNCA expression as described herein.

[0139] As used herein, the terms “treating” or “treatment” refer to a beneficial or desired result including, but not limited to, alleviation or amelioration of one or more signs or symptoms associated with SNCA gene expression or SNCA protein production, e.g., SNCA-associated neurodegenerative disease, e.g., synucleinopathies, such as PD, multiple system atrophy (MSA), Lewy body dementia (LBD), pure autonomic failure (PAF), Pick's disease, progressive supranuclear palsy, dementia pugilistica, parkinsonism linked to chromosome 17, Lytico-Bodig disease, tangle predominant dementia, Argyrophilic grain disease, ganglioglioma, gangliocytoma, meningioangiomatosis, subacute sclerosing panencephalitis, lead encephalopathy, tuberous sclerosis, Hallervorden-Spatz disease, lipofuscinosis, corticobasal degeneration, frontotemporal dementia, frontotemporal lobar degeneration, Alzheimer's disease, Huntington's disease, Down's syndrome, psychosis, schizophrenia and Creutzfeldt-Jakob disease, decreased expression or activity of SNCA in regions of increased neuronal dysfunction or death, in subjects having such neurodegenerative diseases. “Treatment” can also mean prolonging survival as compared to expected survival in the absence of treatment.

[0140] The term “lower” in the context of the level of SNCA in a subject or a disease marker or symptom refers to a statistically significant decrease in such level. The decrease can be, for example, at least 10%, 15%, 20%, 25%, 30%, %, 40%, 45%, 50%, 55%, 60%, 65%, 70%, 75%, 80%, 85%, 90%, 95%, or more. In certain embodiments, a decrease is at least 20%. In certain embodiments, the decrease is at least 50% in a disease marker, e.g., protein or gene expression level. “Lower” in the context of the level of SNCA in a subject is optionally down to a level accepted as within the range of normal for an individual without such disorder. In certain embodiments, “lower” is the decrease in the difference between the level of a marker or symptom for a subject suffering from a disease and a level accepted within the range of normal for an individual, e.g., the level of decrease in speed of movement (bradykinesia) and ability to regulate posture and balance in an individual having Parkinson's and an individual not having Parkinson's or having symptoms that are within the range of normal.

[0141] As used herein, “prevention” or “preventing,” when used in reference to a disease or disorder, that would benefit from a reduction in expression of a SNCA gene or production of SNCA protein, e.g., in a subject susceptible to a SNCA-associated disorder due to, e.g., genetic factors or age, wherein the subject does not yet meet the diagnostic criteria for the SNCA-associated disorder. As used herein, prevention can be understood as administration of an agent to a subject who does not yet meet the diagnostic criteria for the SNCA-associated disorder to delay or reduce the likelihood that the subject will develop the SNCA-associated disorder. As the agent is a pharmaceutical agent, it is understood that administration typically would be under the direction of a health care professional capable of identifying a subject who does not yet meet the diagnostic criteria for a SNCA-associated disorder as being susceptible to developing a SNCA-associated disorder.

[0142] The term “synucleinopathies” refers to a group of neurodegenerative disorders characterized by fibrillary aggregates of α-synuclein protein that tend to accumulate in the cytoplasm of selective populations of neurons and glia. Synucleinopathies are therefore a class of SNCA-associated neurodegenerative diseases and disorders, which include Parkinson's disease (PD), Lewy body dementia (LBD), pure autonomic failure (PAF), and multiple system atrophy (MSA), among other neurodegenerative diseases. Clinically, synucleinopathies are characterized by a chronic and progressive decline in motor, cognitive, behavioral, and autonomic functions, depending on the distribution of the lesions in the brain. Because of clinical overlap, differential diagnosis is sometimes very difficult. Parkinsonism is the predominant symptom of PD, but it can be indistinguishable from the parkinsonism of LBD and MSA. Autonomic dysfunction, which is an isolated finding in PAF, may be present in PD and LBD, but is usually more prominent and appears earlier in MSA. LBD could be the same disease as PD but with widespread cortical pathological states, leading to dementia, fluctuating cognition, and the characteristic visual hallucinations.

[0143] The likelihood of developing a synucleinopathy, e.g., PD, LBD, etc., is reduced, for example, when an individual having one or more risk factors for PD or for LBD (or other synucleinopathy) either fails to develop PD or LBD (or other synucleinopathy) or develops PD or LBD (or other synucleinopathy) with less severity relative to a population having the same risk factors and not receiving treatment as described herein. The failure to develop a SNCA-associated disorder, e.g., PD or LBD (or other synucleinopathy), or a delay in the time to develop PD or LBD (or other synucleinopathy) by months or years is considered effective prevention. Prevention may require administration of more than one dose of the iRNA agent. Provided with appropriate methods to identify subjects at risk to develop any of the SNCA-associated diseases above, the iRNA agents provided herein can be used as pharmaceutical agents for or in methods of prevention of SNCA-associated diseases. Risk factors for various SNCA-associated diseases are discussed herein.

[0144] As used herein, the term “Parkinson's disease” or “PD” refers to a progressive nervous system disorder that affects movement. The main pathological characteristics of PD are cell death in the brain's basal ganglia (affecting up to 70% of the dopamine secreting neurons in the substantia nigra pars compacta by the end of life) and the presence of Lewy bodies (accumulations of the SNCA-encoded (α-synuclein protein) in many of the remaining neurons. Symptoms start gradually, sometimes with a barely noticeable tremor in just one hand, or stiffness or slowing of movement. Other early symptoms include lack of facial expression, lack of arm movement while walking, and slurring during speech. Parkinson's disease symptoms worsen over time. The average onset of PD is age 60, and later onset is associated with greater symptom severity. Clinical features include, but are not limited to, more severe tremors, slowed movement (bradykinesia), rigid muscles, impaired posture and balance, loss of automatic movements, speech changes, and eventually, dementia, hallucinations, and wheelchair confinement.

[0145] As used herein, the term “Lewy body dementia (LBD)” refers to a type of progressive dementia that leads to a decline in thinking, reasoning and independent function caused by the aggregation of α-synuclein protein within diseased brain neurons, known as Lewy bodies and Lewy neurites. Aggregates of α-synuclein protein lead to sub-optimal functioning and eventual death of the affected neurons. Symptoms include visual, auditory, olfactory, or tactile hallucinations, signs of Parkinson's disease (parkinsonian signs), poor regulation of body functions (autonomic nervous system) such as dizziness, falls and bowel issues, cognitive problems such as confusion, poor attention, visual-spatial problems and memory loss, sleep difficulties such as rapid eye movement (REM) sleep behavior disorder (in which dreams are physically acted out while asleep), fluctuating attention including episodes of drowsiness, long periods of staring into space, long naps during the day or disorganized speech, depression, and apathy.

[0146] As used herein, the term “Multiple System Atrophy (MSA)” refers to a rare, degenerative neurological disorder affecting a subject's involuntary (autonomic) functions, including blood pressure, breathing, bladder function and motor control. Formerly called Shy-Drager syndrome, olivopontocerebellar atrophy or striatonigral degeneration, MSA shares many Parkinson's disease-like symptoms, such as slow movement, rigid muscles and poor balance. MSA treatment includes medications and lifestyle changes to help manage symptoms, but there is no cure. MSA causes deterioration and shrinkage (atrophy) of portions of the brain (cerebellum, basal ganglia and brainstem) that regulate internal body functions, digestion and motor control. The damaged brain tissue of MSA subjects shows nerve cells (neurons) that contain an abnormal amount of alphα-synuclein. MSA subjects typically live about seven to 10 years after MSA symptoms first appear. However, the survival rate with MSA varies widely. Occasionally, MSA subjects can live for 15 years or longer with the disease. Death is often due to respiratory problems. MSA progresses gradually and eventually leads to death. Affecting many parts of the body. MSA symptoms typically develop in adulthood, usually in the 50s or 60s. MSA is classified by two types: parkinsonian and cerebellar. The type depends on the symptoms observed at diagnosis. Parkinsonian type MSA is the most common type of MSA, with signs and symptoms similar to those of Parkinson's disease, such as rigid muscles, difficulty bending arms and legs, slow movement (bradykinesia), tremors (rare in MSA compared with classic Parkinson's disease), and problems with posture and balance. Cerebellar type MSA signs and symptoms include problems with muscle coordination (ataxia), also possibly including impaired movement and coordination, such as unsteady gait and loss of balance, slurred, slow or low-volume speech (dysarthria), visual disturbances, such as blurred or double vision and difficulty focusing the eyes, difficulty swallowing (dysphagia) or chewing, as well as general signs and symptoms. In addition, the primary sign of multiple system atrophy is postural (orthostatic) hypotension, a form of low blood pressure that makes a subject feel dizzy or lightheaded, or even faint, when a subject stands up from sitting or lying down. MSA subjects may also develop dangerously high blood pressure levels while lying down (supine hypertension). Other difficulties associated with MSA include involuntary (autonomic) body functions, such as urinary and bowel dysfunction, constipation, loss of bladder or bowel control (incontinence), sweating abnormalities, reduced production of sweat, tears and saliva, heat intolerance due to reduced sweating, impaired body temperature control, often causing cold hands or feet, sleep disorders, agitated sleep due to “acting out” dreams, abnormal breathing at night, sexual dysfunction, inability to achieve or maintain an erection (impotence), loss of libido, cardiovascular problems, color changes in hands and feet caused by pooling of blood, cold hands and feet, psychiatric problems, and difficulty controlling emotions, such as laughing or crying inappropriately. Possible complications of MSA include breathing abnormalities during sleep, injuries from falls caused by poor balance or fainting, progressive immobility that can lead to secondary problems such as a breakdown of your skin, loss of ability to care for oneself in day-to-day activities, vocal cord paralysis, which makes speech and breathing difficult, and increased difficulty swallowing.

[0147] In one embodiment, a SNCA-associated disease or disorder (synucleinopathy) is one of Parkinson's disease, Lewy body dementia, multiple system atrophy (MSA), and pure autonomic failure (PAF).

[0148] “Therapeutically effective amount,” as used herein, is intended to include the amount of an RNAi agent that, when administered to a subject having a SNCA-associated disease, is sufficient to effect treatment of the disease (e.g., by diminishing, ameliorating, or maintaining the existing disease or one or more symptoms of disease). The “therapeutically effective amount” may vary depending on the RNAi agent, how the agent is administered, the disease and its severity and the history, age, weight, family history, genetic makeup, the types of preceding or concomitant treatments, if any, and other individual characteristics of the subject to be treated.

[0149] “Prophylactically effective amount,” as used herein, is intended to include the amount of an RNAi agent that, when administered to a subject having a SNCA-associated disorder, is sufficient to prevent or ameliorate the disease or one or more symptoms of the disease. Ameliorating the disease includes slowing the course of the disease or reducing the severity of later-developing disease. The “prophylactically effective amount” may vary depending on the RNAi agent, how the agent is administered, the degree of risk of disease, and the history, age, weight, family history, genetic makeup, the types of preceding or concomitant treatments, if any, and other individual characteristics of the patient to be treated.

[0150] A “therapeutically-effective amount” or “prophylactically effective amount” also includes an amount of an RNAi agent that produces some desired local or systemic effect at a reasonable benefit/risk ratio applicable to any treatment. An RNAi agent employed in the methods of the present disclosure may be administered in a sufficient amount to produce a reasonable benefit/risk ratio applicable to such treatment.

[0151] The phrase “pharmaceutically acceptable” is employed herein to refer to those compounds, materials, compositions, or dosage forms which are, within the scope of sound medical judgment, suitable for use in contact with the tissues of human subjects and animal subjects without excessive toxicity, irritation, allergic response, or other problem or complication, commensurate with a reasonable benefit/risk ratio.

[0152] The phrase “pharmaceutically-acceptable carrier” as used herein means a pharmaceutically-acceptable material, composition or vehicle, such as a liquid or solid filler, diluent, excipient, manufacturing aid (e.g., lubricant, talc magnesium, calcium or zinc stearate, or steric acid), or solvent encapsulating material, involved in carrying or transporting the subject compound from one organ, or portion of the body, to another organ, or portion of the body. Each carrier must be “acceptable” in the sense of being compatible with the other ingredients of the formulation and not injurious to the subject being treated. Some examples of materials which can serve as pharmaceutically-acceptable carriers include: (1) sugars, such as lactose, glucose and sucrose; (2) starches, such as corn starch and potato starch; (3) cellulose, and its derivatives, such as sodium carboxymethyl cellulose, ethyl cellulose and cellulose acetate; (4) powdered tragacanth; (5) malt; (6) gelatin; (7) lubricating agents, such as magnesium state, sodium lauryl sulfate and talc; (8) excipients, such as cocoa butter and suppository waxes; (9) oils, such as peanut oil, cottonseed oil, safflower oil, sesame oil, olive oil, corn oil and soybean oil; (10) glycols, such as propylene glycol; (11) polyols, such as glycerin, sorbitol, mannitol and polyethylene glycol; (12) esters, such as ethyl oleate and ethyl laurate; (13) agar; (14) buffering agents, such as magnesium hydroxide and aluminum hydroxide; (15) alginic acid; (16) pyrogen-free water; (17) isotonic saline; (18) Ringer's solution; (19) ethyl alcohol; (20) pH buffered solutions; (21) polyesters, polycarbonates or polyanhydrides; (22) bulking agents, such as polypeptides and amino acids (23) serum component, such as serum albumin, HDL and LDL; and (22) other non-toxic compatible substances employed in pharmaceutical formulations.

[0153] The term “sample,” as used herein, includes a collection of similar fluids, cells, or tissues isolated from a subject, as well as fluids, cells, or tissues present within a subject. Examples of biological fluids include blood, serum and serosal fluids, plasma, cerebrospinal fluid, ocular fluids, lymph, urine, saliva, and the like. Tissue samples may include samples from tissues, organs or localized regions. For example, samples may be derived from particular organs, parts of organs, or fluids or cells within those organs. In certain embodiments, samples may be derived from the brain (e.g., whole brain or certain segments of brain, e.g., striatum, or certain types of cells in the brain, such as, e.g., neurons and glial cells (astrocytes, oligodendrocytes, microglial cells)). In other embodiments, a “sample derived from a subject” refers to blood drawn from the subject or plasma or serum derived therefrom. In further embodiments, a “sample derived from a subject” refers to brain tissue (or subcomponents thereof) or retinal tissue (or subcomponents thereof) derived from the subject.

[0154] It will be understood that, although the sequences in Table 2 are described as modified or conjugated sequences, in certain embodiments, the RNA of the RNAi agent of the disclosure e.g., a dsRNA of the disclosure, may comprise any one of the sequences set forth in Tables 2 or 3 that is modified or conjugated differently than described therein. A lipophilic ligand can be included in any of the positions provided in the instant application, except where a specific position/location is specified.

### BRIEF DESCRIPTION OF THE DRAWINGS

[0155] FIGS. 1A and 1B show the effects of selected SNCA-targeting RNAi agents on SNCA levels in human BE(2)-C neuroblastoma cells, a dual luciferase reporter system in COS-7 African green monkey fibroblast-like cells, and in human SNCA-AAV over-expressing mice. FIG. 1A shows SNCA mRNA knockdown results obtained for SNCA-targeting RNAi agents AD-464778, AD-464782, AD-464694, AD-464634, AD-464779, AD-464314, AD-464313, AD-464590, AD-464585, AD-464229, AD-464586, and AD-464592 (“parental” siRNAs harboring triantennary GalNAc modifications, relative to the CNS-directed siRNAs of the instant disclosure) in BE(2)-C cells, and using a dual luciferase reporter system in COS-7 cells, respectively for each siRNA. FIG. 1B shows in vivo liver SNCA knockdown results for indicated duplexes in human SNCA-AAV over-expressing mice. To identify RNA in vivo efficacy of the RNAi compounds in mice, a full-length human SNCA was first transduced by AAV. At 7 days post AAV-administration, the following selected duplexes were delivered: duplexes targeting the 3′UTR of human SNCA AD-464778, AD-464782, AD-464694, AD-464634, AD-464779; and duplexes targeting the coding sequence of SNCA AD-464314, AD-464313, AD-464590, AD-464585, AD-464229, AD-464586, and AD-464592. Data were normalized to PBS-treated samples.

[0156] FIG. 2 shows SNCA knockdown results for the forty most potent SNCA-targeting siRNAs (liver targeting duplexes) in a combined hot spot and structure activity relationship (SAR) assessment performed upon 360 total duplexes. The forty indicated siRNAs showed the highest SNCA knockdown results at 0.1 nM duplex concentration and exhibited a clear linear dose-response.

[0157] FIG. 3 shows a schematic diagram for the exemplary AD-1549290 duplex, which possessed sense strand sequence 5′-uscscca(Ghd)uuUfCfUfugagaucugaL96-3′ (SEQ ID NO: 245) and antisense strand sequence 5′-VPusdCsagdAudCucaadGaAfacugggasgsc-3′ (SEQ ID NO: 246).

[0158] FIG. 4 shows results of an in vivo AAV titration study, in which AAV was employed to administer human SNCA to mouse liver and the extent of delivery and expression was then assessed. At left, the cycle threshold for PCR-meditated human SNCA detection used to evaluate human SNCA expression in mouse liver was shown to drop in a dose-responsive manner when AAV was employed to administer human SNCA. At right, previously characterized SNCA-targeting siRNAs AD-464634 (targeting SNCA 3′ UTR sequences) and AD-464314 (targeting SNCA coding sequences) were demonstrated to inhibit SNCA expression robustly in vivo in mouse liver, when administered at either 3 mg/kg (mpk) or 10 mpk levels to huSNCA-expressing mice.

[0159] FIGS. 5A and 5B show in vivo SNCA knockdown results in mouse liver for all 17 SNCA-targeting siRNAs evaluated in in vivo AAV studies, as well as schematic diagrams of duplex sequence modification patterns. FIG. 5A shows in vivo human SNCA knockdown results observed in mice administered human SNCA via AAV. The 17 indicated newly evaluated SCNA-targeting siRNAs were compared to previously identified SNCA-targeting duplex AD-464634.2 and to a PBS control. FIG. 5B shows schematic diagrams of sequences and modification patterns for potent liver-targeting duplexes AD-1549333 (sense strand: 5′-asasgug(Chd)ucAfGfUfuccaaugugaL96-3′ SEQ ID NO: 247; antisense strand: 5′-VPusdCsacdAudTggaadCuGfagcacuusgsu-3′ SEQ ID NO: 248), AD-1746465 (sense strand: 5′-uscsuuugcuCfCfCfaguu(Uhd)cuugaL96-3′ SEQ ID NO: 249; antisense strand: 5′-VPusdCsaadGadAacugdGgAfgcaaagasusa-3′ SEQ ID NO: 250), AD-1571188 (sense strand: 5′-gsusaca(Ahd)GfuGfCfUfcaguuccaaaL96-3′ SEQ ID NO: 251; antisense strand: 5′-VPusUfsugdGa(Agn)cugagcAfcUfuguacsasg-3′ SEQ ID NO: 252), AD-1549401 (sense strand: 5′-cscsauc(Ahd)gcAfGfUfgauugaaguaL96-3′ SEQ ID NO: 253; antisense strand: 5′-VPusdAscudTcdAaucadCuGfcugauggsasa-3′ SEQ ID NO: 254), AD-1549054 (sense strand: 5′-gsasgca(Ahd)guGfAfCfaaauguuggaL96-3′ SEQ ID NO: 255; antisense strand: 5′-VPusdCscadAcdAuuugdTcAfcuugcucsusu-3′ SEQ ID NO: 256), AD-1746466 (sense strand: 5′-uscsccag(Uhd)uUfCfUfugagaucugaL96-3′ SEQ ID NO: 257; antisense strand: 5′-VPusdCsagdAudCucaadGaAfacugggasgsc-3′ SEQ ID NO: 258), and AD-1548886 (sense strand: 5′-uscsaug(Ahd)aaGfGfAfcuuucaaagaL96-3′ SEQ ID NO: 259; antisense strand: 5′-VPusdCsuudTgdAaagudCcUfuucaugasasu-3′ SEQ ID NO: 260), which were selected for potential use as parental siRNAs for non-human primate (NHP) studies.

[0160] FIGS. 6A to 6C show comparisons of murine in vivo knockdown, in vitro knockdown and location information, across the above-identified seven SNCA-targeting siRNAs, which yielded three lead candidate parental siRNAs for NHP studies, with structures also shown. FIG. 6A shows the comparison of murine in vivo knockdown and in vitro knockdown across the above-identified seven SNCA-targeting siRNAs AD-1549333, AD-1746465, AD-1571188, AD-1549401, AD-1549054, AD-1746466, and AD-1548886. FIG. 6B shows target SNCA mRNA locations for each of candidate lead parental siRNAs AD-1549333, AD-1746465, AD-1571188, AD-1549401, AD-1549054, AD-1746466, and AD-1548886. FIG. 6C shows sequences and modification patterns for selected lead candidate parent duplexes AD-1549333 (sense strand: SEQ ID NO: 247; antisense strand: SEQ ID NO: 248), AD-1746465 (sense strand: SEQ ID NO: 249; antisense strand: SEQ ID NO: 250), and AD-1549054 (sense strand: SEQ ID NO: 255; antisense strand: SEQ ID NO: 256), from top to bottom. These parental duplexes were respectively adapted to create lead SNCA-targeting duplexes AD-1747585, AD-1747583, and AD-1747580, having sequences and modification patterns as shown in Table 2, for CNS administration in NHP studies.

[0161] FIG. 7 presents a schematic showing three duplexes selected for NHP studies, AD-1747585 (having sense strand SEQ ID NO: 35 and antisense strand SEQ ID NO: 78), AD-1747583 (having sense strand SEQ ID NO: 28 and antisense strand SEQ ID NO: 71), and AD-1747580 (having sense strand SEQ ID NO: 21 and antisense strand SEQ ID NO: 64).

[0162] FIGS. 8A and 8B show initial selection and pharmacokinetic distribution of three candidate lead duplexes that were moved forward into testing in non-human primate (NHP) animals. FIG. 8A shows initial in vivo efficacy results and ED₅₀ values for three candidate lead duplexes selected to move into NHP animal studies, also noting the original GalNAc-modified corresponding forms of duplexes from which the three currently selected duplexes are derived (noting initial RNA-Seq results for each of the original, GalNAc-modified duplexes). FIG. 8B shows that each of three candidate lead SNCA-targeting duplexes dosed to non-human primate (NHP) animals via intrathecal injection with a single 60 mg dose of siRNA showed similar pharmacokinetics across dosed animals for the immediate 24 hour period after injection.

[0163] FIGS. 9A and 9B show pharmacokinetic (PK) and pharmacodynamic (PD) data obtained in NHP animal studies of three candidate lead SNCA-targeting duplexes administered via intrathecal injection. FIG. 9A shows that at day 29 (“D29”) post-injection, each of the three tested SNCA-targeting duplexes exhibited high potency reduction of SNCA mRNA in NHP tissues of both the prefrontal cortex and the midbrain (left panel, PD results). Strong correlation between tissue PK (tissue concentration of tested duplex) and tissue SNCA mRNA PD was observed throughout tested NHP prefrontal cortex and midbrain tissues (right panel, PK/PD results), with each of the three tested duplexes showing similar potencies (no statistically significant differences were observed between the three leads at 29 days, based on mRNA knockdown results). Nominally, the following IC₅₀ ranking was observed in NHPs at day 29: AD-1747583 (0.532 μg/g)<AD-1747580 (1.050 μg/g)<AD-1747585 (1.300 μg/g). FIG. 9B shows that at day 29 (“D29”) post-injection, α-Synuclein protein levels were reduced in the brain and spinal cord of NHPs that received an intrathecal dose of a SNCA-targeting duplex, and little differentiation was observed between the three tested candidate lead agents.

[0164] FIG. 10 shows a summary of Day 29 NHP data, and also shows schematic diagrams of the three candidate lead molecules tested (AD-1747580 (sense strand: SEQ ID NO: 21; antisense strand: SEQ ID NO: 64), AD-1747583 (sense strand: SEQ ID NO: 28; antisense strand: SEQ ID NO: 71), and AD-1747585 (sense strand: SEQ ID NO: 35; antisense strand: SEQ ID NO: 78)).

[0165] FIG. 11 shows that at day 84 (“D84”) after intrathecal administration of SNCA-targeting duplex or control molecules, significant levels of SNCA mRNA knockdown were observed in both prefrontal cortex and midbrain tissues, across all 3 candidate lead duplexes tested (left panel). Consistent with results observed above at day 29 post-administration, day 84 samples exhibited good correlation between tissue PK and tissue mRNA PD, with similar potencies observed for each of the three candidate lead duplexes examined (right panel). Notably, the AD-1747585-administered cohort only had one animal that met dosing criteria, which resulted in the remainder of the AD-1747585-administered cohort being re-dosed.

[0166] FIGS. 12A to 12E show that both SNCA mRNA and α-Synuclein protein levels were reduced at day 84 post-administration in different brain regions, with little differentiation observed between the three candidate leads tested (AD-1747580, AD-1747583, and AD-1747585 duplexes), and also shows SNCA mRNA/α-Synuclein protein correlation and redosing data. FIG. 12A shows that SNCA mRNA was reduced in NHPs at day 84 after administration of 60 mg of duplex agent via the intrathecal route. FIG. 12B shows that α-Synuclein protein levels were also reduced at day 84 in the brain and spinal cord (across all examined regions), again with little differentiation observed between the three candidate lead duplexes. FIG. 12C shows that α-Synuclein protein levels exhibited high correlation to SNCA mRNA levels across the different brain regions examined at day 84 post-administration. FIG. 12D shows that in certain NHPs that were identified as mis-dosed at initial administration, redosing and examining brain and spinal cord tissues at beyond day 84 demonstrated that SNCA NHP tissue protein pharmacodynamics (PD) exhibited robust knockdown, specifically in AD-1747580-re-dosed NHPs, across various brain regions. FIG. 12E shows α-Synuclein protein levels in cerebrospinal fluid (CSF) across an extended time course that included redose and monitoring of certain originally mis-dosed NHPs at time points beyond day 84. In such re-dosed NHP animals, CSF α-Synuclein protein levels exhibited up to a 75% reduction for animals (re)dosed with duplex AD-1747585, while CSF α-Synuclein protein levels exhibited up to a 50% reduction for animals (re)dosed with duplexes AD-1747580 and AD-1747583.

[0167] FIG. 13 shows that at day 84 after duplex administration, observed levels of α-Synuclein protein in NHP CSF were up to 90% reduced (PD effect) for animals dosed with duplexes AD-1747580 and AD-1747583. Meanwhile, duplex AD-1747585 showed ˜75% CSF α-Synuclein protein knockdown, while duplex AD-1747585 notably also exhibited variable CSF α-Synuclein protein knockdown, potentially due to blood contamination, as SNCA is highly expressed in blood cells.

[0168] FIGS. 14A to 14D show a divergence observed between tissue SNCA mRNA levels of knockdown and α-Synuclein protein levels of knockdown in the same tissues, at day 29 (as an “early” timepoint), and that such discrepancies resolved at the day 84 timepoint, indicative of such effects being attributable to a long half-life of α-Synuclein protein in the examined tissues. FIG. 14A shows that at day 29 post-administration, α-Synuclein protein (PD effect of duplexes) in the cortex and midbrain of treated NHPs exhibited only modest (<60%) knockdown for all three lead duplexes tested (left panel). Such modest reductions in α-Synuclein protein levels in cortex and midbrain were indicative of an extended half-life for α-Synuclein protein in such tissues. Tissue protein PK/PD was observed to be scattered for all three tested duplexes (middle panel); however, tissue α-Synuclein protein level was highly correlated with tissue SNCA mRNA level (right panel). FIG. 14B shows that α-Synuclein protein knockdown in CSF correlated with cortex (left panel) and striatal (middle panel) α-Synuclein protein knockdown at day 29 post-administration. In contrast, midbrain tissue α-Synuclein protein knockdown did not correlate well with CSF α-Synuclein protein knockdown at day 29 post-administration (right panel). FIG. 14C shows that while SNCA mRNA levels were reduced at day 29 post-administration (here, of SNCA-targeting duplex AD-1747580) in prefrontal cortex and midbrain tissues, α-Synuclein protein levels were only modestly reduced, which indicated that a long protein half-life for α-Synuclein protein was likely to explain this discrepancy. FIG. 14D shows that at day 84 post-administration, α-Synuclein protein levels in the cortex and midbrain tissues of treated NHP animals showed robust knockdown for all 3 lead duplexes (PD effect, left panel). Robust α-Synuclein protein knockdown observed at day 84 in cortex and midbrain NHP tissues confirmed a long protein half-life for α-Synuclein. Tissue protein PK/PD curves showed similar profiles for all three duplexes (middle panel; AD-1747585 cohort is noted as only having had one animal that met dosing criteria, while the remainder of the cohort was re-dosed). α-Synuclein protein levels were highly correlated with mRNA levels in both cortex and midbrain tissues (right panel).

[0169] FIG. 15 shows that α-Synuclein protein knockdown in CSF in NHP animals was also observed to correlate with prefrontal cortex and midbrain α-Synuclein protein knockdown at day 84 post-duplex administration.

[0170] FIG. 16 shows siRNA tissue exposure across various tested brain regions of NHP animals, at day 84 post-duplex administration. With few exceptions, tissue penetration of siRNA agent was good, even if tissues of greatest exposure to siRNA duplexes (e.g., prefrontal cortex) did not necessarily show the greatest observed levels of SNCA mRNA and/or α-Synuclein protein knockdown.

[0171] FIG. 17 shows that none of the three candidate lead duplexes administered to NHP animals exhibited any significant effect on body weight, either at day 29 or day 84 post-administration, as compared to control NHP animals dosed in parallel with vehicle only.

[0172] FIG. 18 shows results obtained when detecting Neurofilament light chain (NfL) in CSF of candidate lead duplex-dosed cohorts of NHP animals, as compared to a control NHP animal cohort administered artificial CSF (aCSF) only. While a transient spike in NfL was observed after dosing for all three duplexes, such NfL spikes largely did not persist beyond day 29 post-administration, which indicated that the three SNCA-targeting candidate lead duplexes did not appear to have an NfL profile suggestive of duplex toxicity.

[0173] FIGS. 19A to 19D show RNA-Seq data for each of the three candidate lead duplexes examined. FIG. 19A shows a schematic diagram of the AD-1747580 duplex (sense strand: SEQ ID NO: 21; antisense strand: SEQ ID NO: 64), with RNA-Seq data indicating achievement of 93% knockdown of SNCA in cells administered the AD-1747580 duplex and subjected to RNA-Seq analysis, while no other loci across the genome showed greater than a 50% knockdown (or robust and significant elevation) in the presence of the AD-1747580 duplex, as compared to an appropriate control. FIG. 19B shows a potency-matched RNA-Seq profile for candidate lead duplex AD-1747580, where RNA-Seq results for parent duplex AD-1549054 are also shown. At left, a schematic diagram of the GalNAc-modified AD-1549054 parent duplex is displayed (sense strand: 5′-gsasgca(Ahd)guGfAfCfaaauguuggaL96-3′ SEQ ID NO: 255; antisense strand: 5′-VPusdCscadAcdAuuugdTcAfcuugcucsusu-3′ SEQ ID NO: 256) above RNA-Seq data for this duplex, which demonstrated approx. 74% SNCA knockdown in treated cells (administered a 10 nM dose of AD-1549054 parent duplex), noting a rescaled dispersion (RD) value of 0.12 for this duplex using GalNAc controls and a rescaled dispersion value using chemistry-matched controls (RD (C16)) of −0.02. At center and right are a schematic diagram of the AD-1747580 duplex (sense strand: SEQ ID NO: 21; antisense strand: SEQ ID NO: 64) above RNA-Seq results for the duplex at respective 1 nM (center, showing approx. 78% SNCA knockdown) and 10 nM (right, showing approx. 93% SNCA knockdown) doses. At the 1 nM dose, a RD (C16) value of −0.20 was observed, while at the 10 nM dose, a RD (C16) value of −0.11 was observed. All rescaled dispersions were computed relative to positive and negative controls at 10 nM dose. FIG. 19C shows a potency-matched RNA-Seq profile for candidate lead duplex AD-1747583, where RNA-Seq results for parent duplex AD-1549283 are also shown. At left, a schematic diagram of the GalNAc-modified AD-1549283 parent duplex is displayed (sense strand: 5′-uscsuuu(Ghd)cuCfCfCfaguuucuugaL96-3′ SEQ ID NO: 268; antisense strand: 5′-VPusdCsaadGadAacugdGgAfgcaaagasusa-3′ SEQ ID NO: 269) above RNA-Seq data for this duplex, which demonstrated approx. 79% SNCA knockdown in treated cells (administered a 10 nM dose of AD-1549283 parent duplex), noting a rescaled dispersion (RD) value of 0.09 for this duplex using GalNAc controls and a rescaled dispersion value using chemistry-matched controls (RD (C16)) of −0.08. At center and right are a schematic diagram of the AD-1747583 duplex (sense strand: SEQ ID NO: 28; antisense strand: SEQ ID NO: 71) above RNA-Seq results for the duplex at respective 1 nM (center, showing approx. 67% SNCA knockdown) and 10 nM (right, showing approx. 92% SNCA knockdown) doses. At the 1 nM dose, a RD (C16) value of −0.17 was observed, while at the 10 nM dose, a RD (C16) value of 0.31 was observed. Notably, three off-target loci were identified as significantly impacted (>50% reduction) by dosing with the AD-1747583 duplex: PYGB, NREP and LCLAT1. All rescaled dispersions were computed relative to positive and negative controls at 10 nM dose. FIG. 19D shows a potency-matched RNA-Seq profile for candidate lead duplex AD-1747585, where RNA-Seq results for parent duplex AD-1549333 are also shown. At left, a schematic diagram of the GalNAc-modified AD-1549333 parent duplex is displayed (sense strand: 5′-asasgug(Chd)ucAfGfUfuccaaugugaL96-3′ SEQ ID NO: 247; antisense strand: 5′-VPusdCsacdAudTggaadCuGfagcacuusgsu-3′ SEQ ID NO: 248) above RNA-Seq data for this duplex, which demonstrated approx. 81% SNCA knockdown in treated cells (administered a 10 nM dose of AD-1549333 parent duplex), noting a rescaled dispersion (RD) value of 0.10 for this duplex using GalNAc controls and a rescaled dispersion value using chemistry-matched controls (RD (C16)) of −0.06. At center and right are a schematic diagram of the AD-1747585 duplex (sense strand: SEQ ID NO: 35; antisense strand: SEQ ID NO: 78) above RNA-Seq results for the duplex at respective 0.1 nM (left center, showing approx. 68% SNCA knockdown), 1 nM (right center, showing approx. 93% SNCA knockdown) and 10 nM (right, showing approx. 96% SNCA knockdown) doses. At the 0.1 nM dose, a RD (C16) value of −0.06 was observed; at the 1 nM dose, a RD (C16) value of −0.16 was observed; and at the 10 nM dose, a RD (C16) value of 0.20 was observed. Notably, one off-target locus was identified as significantly impacted (>50% reduction) by dosing with the AD-1747585 duplex: HMGB2. All rescaled dispersions were computed relative to positive and negative controls at 10 nM dose.

[0174] FIG. 20 shows a table summarizing knockdown and RNA-Seq data for all three candidate lead SNCA-targeting duplexes administered to NHP animals, while also presenting an additional schematic diagram of the AD-1747580 duplex (sense strand: SEQ ID NO: 21; antisense strand: SEQ ID NO: 64).

[0175] The present invention is further illustrated by the following detailed description.

### DETAILED DESCRIPTION OF THE INVENTION

[0176] The present disclosure provides RNAi compositions, which effect the RNA-induced silencing complex (RISC)-mediated cleavage of RNA transcripts of a SNCA gene. The SNCA gene may be within a cell, e.g., a cell within a subject, such as a human. The present disclosure also provides methods of using the RNAi compositions of the disclosure for inhibiting the expression of a SNCA gene or for treating a subject having a disorder that would benefit from inhibiting or reducing the expression of a SNCA gene, e.g., a SNCA-associated disease, e.g., a synucleinopathy, such as PD, multiple system atrophy (MSA), Lewy body dementia (LBD), pure autonomic failure (PAF), Pick's disease, progressive supranuclear palsy, dementia pugilistica, parkinsonism linked to chromosome 17, Lytico-Bodig disease, tangle predominant dementia, Argyrophilic grain disease, ganglioglioma, gangliocytoma, meningioangiomatosis, subacute sclerosing panencephalitis, lead encephalopathy, tuberous sclerosis, Hallervorden-Spatz disease, lipofuscinosis, corticobasal degeneration, frontotemporal dementia, frontotemporal lobar degeneration, Alzheimer's disease, Huntington's disease, Down's syndrome, psychosis, schizophrenia and Creutzfeldt-Jakob disease.

[0177] The RNAi agents of the disclosure include an RNA strand (the antisense strand) having a region which is about 30 nucleotides or less in length, e.g., 15-30, 15-29, 15-28, 15-27, 15-26, 15-25, 15-24, 15-23, 15-22, 15-21, 15-20, 15-19, 15-18, 15-17, 18-30, 18-29, 18-28, 18-27, 18-26, 18-25, 18-24, 18-23, 18-22, 18-21, 18-20, 19-30, 19-29, 19-28, 19-27, 19-26, 19-25, 19-24, 19-23, 19-22, 19-21, 19-20, 20-30, 20-29, 20-28, 20-27, 20-26, 20-25, 20-24, 20-23, 20-22, 20-21, 21-30, 21-29, 21-28, 21-27, 21-26, 21-25, 21-24, 21-23, or 21-22 nucleotides in length, which region is substantially complementary to at least part of an mRNA transcript of a SNCA gene. In certain embodiments, the RNAi agents of the disclosure include an RNA strand (the antisense strand) having a region which is about 21-23 nucleotides in length, which region is substantially complementary to at least part of an mRNA transcript of a SNCA gene.

[0178] In certain embodiments, the RNAi agents of the disclosure include an RNA strand (the antisense strand) which can include longer lengths, for example up to 66 nucleotides, e.g., 36-66, 26-36, 25-36, 31-60, 22-43, 27-53 nucleotides in length with a region of at least 19 contiguous nucleotides that is substantially complementary to at least a part of an mRNA transcript of a SNCA gene. These RNAi agents with the longer length antisense strands optionally include a second RNA strand (the sense strand) of 20-60 nucleotides in length wherein the sense and antisense strands form a duplex of 18-30 contiguous nucleotides.

[0179] The use of these RNAi agents enables the targeted degradation of mRNAs of a SNCA gene in mammals. Thus, methods and compositions including these RNAi agents are useful for treating a subject who would benefit by a reduction in the levels or activity of a SNCA protein, such as a subject having a SNCA-associated neurodegenerative disease, e.g. a synucleinopathy, such as PD, multiple system atrophy, Lewy body dementia (LBD), pure autonomic failure (PAF), Pick's disease, progressive supranuclear palsy, dementia pugilistica, parkinsonism linked to chromosome 17, Lytico-Bodig disease, tangle predominant dementia, Argyrophilic grain disease, ganglioglioma, gangliocytoma, meningioangiomatosis, subacute sclerosing panencephalitis, lead encephalopathy, tuberous sclerosis, Hallervorden-Spatz disease, lipofuscinosis, corticobasal degeneration, frontotemporal dementia, frontotemporal lobar degeneration, Alzheimer's disease, Huntington's disease, Down's syndrome, psychosis, schizophrenia and Creutzfeldt-Jakob disease.

[0180] Intraneuronal accumulation of α-synuclein has been described as either resulting in the formation of Lewy bodies, round eosinophilic hyaline 10-20 prn large inclusions, or Lewy, neurites, elongated thread-like dystrophic axons and dendrites. Without wishing to be bound by theory, in the PD brain, deposition of Lewy bodies and Lewy neurites is widespread, though the most vulnerable region for such deposition is believed to be the substantia nigra. Pathology is widespread, as PD has both motor (substantia nigra-based) and non-motor (other parts of the brain, e.g., cortex, etc.) symptoms. Substantia nigra cells are crucial for the execution of movement and postural functions, explaining the nature of PD motor symptoms, while impact upon other cell types explains PD non-motor symptoms, such as dementia, mood changes and depression. In the LBD brain, widespread depositions of Lewy bodies and Lewy neurites are found both in midbrain and cortical areas.

[0181] α-Synuclein is a protein which is mainly found intraneuronally. Within the neuron, α-synuclein is predominantly located presynaptically and it has therefore been speculated that it plays a role in the regulation of synaptic activity, Three main isoforms of α-synuclein have been identified, of which the longest and most common form comprises 140 amino acids.

[0182] Oxidative stress has been implicated in a number of neurodegenerative disorders characterized by the pathological accumulation of misfolded α-synuclein. Various reactive oxygen species can induce peroxidation of lipids such as cellular membranes or lipoproteins and also result in the generation of highly reactive aldehydes from poly-unsaturated fatty acids (Yoritaka et al. 1996)

[0183] Brain pathology indicative of Alzheimer's disease (AD), i.e., amyloid plaques and neurofibrillary tangles, are seen in approximately 50% of cases with LBD. It is unclear whether the existence of parallel pathologies implies two different diseases or just represents a variant of each respective disorder. Sometimes the cases with co-pathology are described as having a Lewy body variant of AD (Hansen et al., 1990).

[0184] Research has also implicated a role of SNCA in AD and Down's syndrome, as the α-synuclein protein has been demonstrated to accumulate in the limbic region in these disorders (Crews et al., 2009).

[0185] Rare dominantly inherited forms of PD and LBD can be caused by point mutations or duplications of the SNCA gene. The pathogenic mutations A30P and A53T (Kruger et al., 1998) (Polymeropoulos et al., 1998) and duplication of the gene (Chartier-Harlin et al., 2004) have been described to cause familial PD, whereas one other α-synuclein mutation, E46K (Zarranz et al., 2004) as well as triplication of the α-synuclein gene (Singleton et al., 2003) have been reported to cause either PD or LED.

[0186] The pathogenic consequences of the α-synuclein mutations are only partly understood. However, in vitro data have shown that the A30P and A53T mutations increase the rate of aggregation (Conway et al., 2000). A broad range of differently composed α-synuclein species (monomers, dimers, oligomers, including protofibrils) are involved in the aggregation process, all of which may have different toxic properties. It is not clear which molecular species exert toxic effects in the brain. However, research has indicated that oligomeric forms of α-synuclein are particularly neurotoxic. Additional evidence for the role of oligomers is given by the observation that certain α-synuclein mutations (A30P and A53T) causing hereditary Parkinson's disease, lead to an increased rate of oligomerization.

[0187] It is not completely known how the α-synuclein aggregation cascade begins, Possibly, an altered conformation of monomeric α-synuclein initiates formation of dimers and trimers, which continue to form higher soluble oligomers, including protofibrils, before these intermediately sized species are deposited as insoluble fibrils in Lewy bodies. It is also conceivable that the α-synuclein oligomers, once they are formed, can bind new monomers and/or smaller multimers of α-synuclein and hence accelerate the fibril formation process. Such seeding effects can possibly also occur in the extracellular space as some evidence suggests that α-synuclein pathology may propagate from neuron to neuron in the diseased brain.

[0188] The following detailed description discloses how to make and use compositions containing RNAi agents to inhibit the expression of a SNCA gene, as well as compositions and methods for treating subjects having diseases and disorders that would benefit from inhibition or reduction of the expression of the genes.

### I. RNAi Agents of the Disclosure

[0189] Described herein are RNAi agents which inhibit the expression of a SNCA gene. In one embodiment, the RNAi agent includes double stranded ribonucleic acid (dsRNA) molecules for inhibiting the expression of a SNCA gene in a cell, such as a cell within a subject, e.g., a mammal, such as a human having a SNCA-associated neurodegenerative disease, e.g., a synucleinopathy, such as PD, multiple system atrophy (MSA), Lewy body dementia (LBD), pure autonomic failure (PAF), Pick's disease, progressive supranuclear palsy, dementia pugilistica, parkinsonism linked to chromosome 17, Lytico-Bodig disease, tangle predominant dementia, Argyrophilic grain disease, ganglioglioma, gangliocytoma, meningioangiomatosis, subacute sclerosing panencephalitis, lead encephalopathy, tuberous sclerosis, Hallervorden-Spatz disease, lipofuscinosis, corticobasal degeneration, frontotemporal dementia, frontotemporal lobar degeneration, Alzheimer's disease, Huntington's disease, Down s syndrome, psychosis, schizophrenia and Creutzfeldt-Jakob disease. The dsRNA includes an antisense strand having a region of complementarity which is complementary to at least a part of an mRNA formed in the expression of a SNCA gene. In embodiments, the region of complementarity is about 15-30 nucleotides or less in length. Upon contact with a cell expressing the SNCA gene, the RNAi agent inhibits the expression of the SNCA gene (e.g., a human gene, a primate gene, a non-primate gene) by at least 50% as assayed by, for example, a PCR or branched DNA (bDNA)-based method, or by a protein-based method, such as by immunofluorescence analysis, using, for example, western blotting or flow cytometric techniques.

[0190] A dsRNA includes two RNA strands that are complementary and hybridize to form a duplex structure under conditions in which the dsRNA will be used. One strand of a dsRNA (the antisense strand) includes a region of complementarity that is substantially complementary, and generally fully complementary, to a target sequence. The target sequence can be derived from the sequence of an mRNA formed during the expression of a SNCA gene. The other strand (the sense strand) includes a region that is complementary to the antisense strand, such that the two strands hybridize and form a duplex structure when combined under suitable conditions. As described elsewhere herein and as known in the art, the complementary sequences of a dsRNA can also be contained as self-complementary regions of a single nucleic acid molecule, as opposed to being on separate oligonucleotides.

[0191] Generally, the duplex structure is 15 to 30 base pairs in length, e.g., 15-29, 15-28, 15-27, 15-26, 15-25, 15-24, 15-23, 15-22, 15-21, 15-20, 15-19, 15-18, 15-17, 18-30, 18-29, 18-28, 18-27, 18-26, 18-25, 18-24, 18-23, 18-22, 18-21, 18-20, 19-30, 19-29, 19-28, 19-27, 19-26, 19-25, 19-24, 19-23, 19-22, 19-21, 19-20, 20-30, 20-29, 20-28, 20-27, 20-26, 20-25, 20-24, 20-23, 20-22, 20-21, 21-30, 21-29, 21-28, 21-27, 21-26, 21-25, 21-24, 21-23, or 21-22 base pairs in length. In certain preferred embodiments, the duplex structure is 18 to 25 base pairs in length, e.g., 18-25, 18-24, 18-23, 18-22, 18-21, 18-20, 19-25, 19-24, 19-23, 19-22, 19-21, 19-20, 20-25, 20-24, 20-23, 20-22, 20-21, 21-25, 21-24, 21-23, 21-22, 22-25, 22-24, 22-23, 23-25, 23-24 or 24-25 base pairs in length, for example, 19-21 base pairs in length. Ranges and lengths intermediate to the above recited ranges and lengths are also contemplated to be part of the disclosure.

[0192] Similarly, the region of complementarity to the target sequence is 15 to 30 nucleotides in length, e.g., 15-29, 15-28, 15-27, 15-26, 15-25, 15-24, 15-23, 15-22, 15-21, 15-20, 15-19, 15-18, 15-17, 18-30, 18-29, 18-28, 18-27, 18-26, 18-25, 18-24, 18-23, 18-22, 18-21, 18-20, 19-30, 19-29, 19-28, 19-27, 19-26, 19-25, 19-24, 19-23, 19-22, 19-21, 19-20, 20-30, 20-29, 20-28, 20-27, 20-26, 20-25, 20-24, 20-23, 20-22, 20-21, 21-30, 21-29, 21-28, 21-27, 21-26, 21-25, 21-24, 21-23, or 21-22 nucleotides in length, for example 19-23 nucleotides in length or 21-23 nucleotides in length. Ranges and lengths intermediate to the above recited ranges and lengths are also contemplated to be part of the disclosure.

[0193] In some embodiments, the dsRNA is 15 to 23 nucleotides in length, or 24 to 30 nucleotides in length (optionally, 25 to 30 nucleotides in length). In general, the dsRNA can be long enough to serve as a substrate for the Dicer enzyme. For example, it is well known in the art that dsRNAs longer than about 21-23 nucleotides can serve as substrates for Dicer. As the ordinarily skilled person will also recognize, the region of an RNA targeted for cleavage will most often be part of a larger RNA molecule, often an mRNA molecule. Where relevant, a “part” of an mRNA target is a contiguous sequence of an mRNA target of sufficient length to allow it to be a substrate for RNAi-directed cleavage (i.e., cleavage through a RISC pathway).

[0194] One of skill in the art will also recognize that the duplex region is a primary functional portion of a dsRNA, e.g., a duplex region of about 15 to 36 base pairs, e.g., 15-36, 15-35, 15-34, 15-33, 15-32, 15-31, 15-30, 15-29, 15-28, 15-27, 15-26, 15-25, 15-24, 15-23, 15-22, 15-21, 15-20, 15-19, 15-18, 15-17, 18-30, 18-29, 18-28, 18-27, 18-26, 18-25, 18-24, 18-23, 18-22, 18-21, 18-20, 19-30, 19-29, 19-28, 19-27, 19-26, 19-25, 19-24, 19-23, 19-22, 19-21, 19-20, 20-30, 20-29, 20-28, 20-27, 20-26, 20-25, 20-24, 20-23, 20-22, 20-21, 21-30, 21-29, 21-28, 21-27, 21-26, 21-25, 21-24, 21-23, or 21-22 base pairs, for example, 19-21 base pairs. Thus, in one embodiment, to the extent that it becomes processed to a functional duplex, of e.g., 15-30 base pairs, that targets a desired RNA for cleavage, an RNA molecule or complex of RNA molecules having a duplex region greater than 30 base pairs is a dsRNA. Thus, an ordinarily skilled artisan will recognize that in one embodiment, a miRNA is a dsRNA. In another embodiment, a dsRNA is not a naturally occurring miRNA. In another embodiment, an RNAi agent useful to target SNCA expression is not generated in the target cell by cleavage of a larger dsRNA.

[0195] A dsRNA as described herein can further include one or more single-stranded nucleotide overhangs e.g., 1, 2, 3, or 4 nucleotides. A nucleotide overhang can comprise or consist of a nucleotide/nucleoside analog, including a deoxynucleotide/nucleoside. The overhang(s) can be on the sense strand, the antisense strand or any combination thereof. Furthermore, the nucleotide(s) of an overhang can be present on the 5′-end, 3′-end or both ends of either an antisense or sense strand of a dsRNA. In certain embodiments, longer, extended overhangs are possible.

[0196] A dsRNA can be synthesized by standard methods known in the art as further discussed below, e.g., by use of an automated DNA synthesizer, such as are commercially available from, for example, Biosearch, Applied Biosystems, Inc.

[0197] iRNA compounds of the disclosure may be prepared using a two-step procedure. First, the individual strands of the double stranded RNA molecule are prepared separately. Then, the component strands are annealed. The individual strands of the siRNA compound can be prepared using solution-phase or solid-phase organic synthesis or both. Organic synthesis offers the advantage that the oligonucleotide strands comprising unnatural or modified nucleotides can be easily prepared. Single-stranded oligonucleotides of the disclosure can be prepared using solution-phase or solid-phase organic synthesis or both.

[0198] An siRNA can be produced, e.g., in bulk, by a variety of methods. Exemplary methods include: organic synthesis and RNA cleavage, e.g., in vitro cleavage.

[0199] An siRNA can be made by separately synthesizing a single stranded RNA molecule, or each respective strand of a double-stranded RNA molecule, after which the component strands can then be annealed.

[0200] A large bioreactor, e.g., the OligoPilot II from Pharmacia Biotec AB (Uppsala Sweden), can be used to produce a large amount of a particular RNA strand for a given siRNA. The OligoPilotII reactor can efficiently couple a nucleotide using only a 1.5 molar excess of a phosphoramidite nucleotide. To make an RNA strand, ribonucleotides amidites are used. Standard cycles of monomer addition can be used to synthesize the 21 to 23 nucleotide strand for the siRNA. Typically, the two complementary strands are produced separately and then annealed, e.g., after release from the solid support and deprotection.

[0201] Organic synthesis can be used to produce a discrete siRNA species. The complementary of the species to a SNCA gene can be precisely specified. For example, the species may be complementary to a region that includes a polymorphism, e.g., a single nucleotide polymorphism. Further the location of the polymorphism can be precisely defined. In some embodiments, the polymorphism is located in an internal region, e.g., at least 4, 5, 7, or 9 nucleotides from one or both of the termini.

[0202] In one embodiment, RNA generated is carefully purified to remove ends. iRNA is cleaved in vitro into siRNAs, for example, using a Dicer or comparable RNAse Ill-based activity. For example, the dsiRNA can be incubated in an in vitro extract from Drosophila or using purified components, e.g., a purified RNAse or RISC (RNA-induced silencing complex). See, e.g., Ketting et al. Genes Dev 2001 Oct. 15; 15(20): 2654-9 and Hammond Science 2001 Aug. 10; 293(5532): 1146-50.

[0203] dsiRNA cleavage generally produces a plurality of siRNA species, each being a particular 21 to 23 nt fragment of a source dsiRNA molecule. For example, siRNAs that include sequences complementary to overlapping regions and adjacent regions of a source dsiRNA molecule may be present.

[0204] Regardless of the method of synthesis, the siRNA preparation can be prepared in a solution (e.g., an aqueous or organic solution) that is appropriate for formulation. For example, the siRNA preparation can be precipitated and re-dissolved in pure double-distilled water, and lyophilized. The dried siRNA can then be resuspended in a solution appropriate for the intended formulation process.

[0205] In one aspect, a dsRNA of the disclosure includes at least two nucleotide sequences, a sense sequence and an antisense sequence. The sense strand sequence for SNCA may be selected from the group of sequences provided in Tables 2 or 3, and the corresponding nucleotide sequence of the antisense strand of the sense strand may be selected from the group of sequences in Tables 2 or 3. In this aspect, one of the two sequences is complementary to the other of the two sequences, with one of the sequences being substantially complementary to a sequence of an mRNA generated in the expression of a SNCA gene. As such, in this aspect, a dsRNA will include two oligonucleotides, where one oligonucleotide is described as the sense strand (passenger strand) in Tables 2 or 3, and the second oligonucleotide is described as the corresponding antisense strand (guide strand) of the sense strand in Tables 2 or 3 for SNCA.

[0206] In one embodiment, the substantially complementary sequences of the dsRNA are contained on separate oligonucleotides. In another embodiment, the substantially complementary sequences of the dsRNA are contained on a single oligonucleotide.

[0207] It will be understood that, although the sequences provided herein are described as modified or conjugated sequences, the RNA of the RNAi agent of the disclosure e.g., a dsRNA of the disclosure, may comprise any one of the sequences set forth in in Tables 2 or 3 that is modified or conjugated differently than described therein. One or more lipophilic ligands can be included in any of the positions of the RNAi agents provided in the instant application.

[0208] The skilled person is well aware that dsRNAs having a duplex structure of about 20 to 23 base pairs, e.g., 21, base pairs have been hailed as particularly effective in inducing RNA interference (Elbashir et al., (2001) EMBO J., 20: 6877-6888). However, others have found that shorter or longer RNA duplex structures can also be effective (Chu and Rana (2007) RNA 14: 1714-1719; Kim et al. (2005) Nat Biotech 23: 222-226). In the embodiments described above, by virtue of the nature of the oligonucleotide sequences provided herein, dsRNAs described herein can include at least one strand of a length of minimally 21 nucleotides. It can be reasonably expected that shorter duplexes minus only a few nucleotides on one or both ends can be similarly effective as compared to the dsRNAs described above. Hence, dsRNAs having a sequence of at least 15, 16, 17, 18, 19, 20, or more contiguous nucleotides derived from one of the sequences provided herein, and differing in their ability to inhibit the expression of a SNCA gene by not more than 10, 15, 20, 25, or 30% inhibition from a dsRNA comprising the full sequence using the in vitro assay with Be(2)-C cells and a 10 nM concentration of the RNA agent and the PCR assay as provided in the examples herein, are contemplated to be within the scope of the present disclosure.

[0209] One benchmark assay for inhibition of SNCA involves contacting human Be(2)-C cells with a dsRNA agent as disclosed herein, where sufficient or effective SNCA inhibition is identified if at least 5% reduction, at least 10% reduction, at least 15% reduction, at least 20% reduction, at least 25% reduction, at least 30% reduction, at least 35% reduction, at least 40% reduction, at least 45% reduction, at least 50% reduction, at least 55% reduction, at least 60% reduction, at least 65% reduction, at least 70% reduction, at least 75% reduction, at least 80% reduction, at least 85% reduction, at least 90% reduction, at least 95% reduction, at least 97% reduction, at least 98% reduction, at least 99% reduction, or more of SNCA transcript or protein is observed in contacted cells, as compared to an appropriate control (e.g., cells not contacted with SNCA-targeting dsRNA). Optionally, a dsRNA agent of the disclosure is administered at 10 nM concentration, and the PCR assay is performed as provided in the examples herein (e.g., Example 2 below).

[0210] In addition, the RNAs described herein identify a site(s) in a SNCA transcript that is susceptible to RISC-mediated cleavage. As such, the present disclosure further features RNAi agents that target within this site(s). As used herein, an RNAi agent is said to target within a particular site of an RNA transcript if the RNAi agent promotes cleavage of the transcript anywhere within that particular site. Such an RNAi agent will generally include at least about 15 contiguous nucleotides, optionally at least 19 nucleotides, from one of the sequences provided herein coupled to additional nucleotide sequences taken from the region contiguous to the selected sequence in a SNCA gene.

[0211] An RNAi agent as described herein can contain one or more mismatches to the target sequence. In one embodiment, an RNAi agent as described herein contains no more than 3 mismatches (i.e., 3, 2, 1, or 0 mismatches). In one embodiment, an RNAi agent as described herein contains no more than 2 mismatches. In one embodiment, an RNAi agent as described herein contains no more than 1 mismatch. In one embodiment, an RNAi agent as described herein contains 0 mismatches. In certain embodiments, if the antisense strand of the RNAi agent contains mismatches to the target sequence, the mismatch can optionally be restricted to be within the last 5 nucleotides from either the 5′- or 3′-end of the region of complementarity. For example, in such embodiments, for a 23 nucleotide RNAi agent, the strand which is complementary to a region of a SNCA gene generally does not contain any mismatch within the central 13 nucleotides. The methods described herein or methods known in the art can be used to determine whether an RNAi agent containing a mismatch to a target sequence is effective in inhibiting the expression of a SNCA gene. Consideration of the efficacy of RNAi agents with mismatches in inhibiting expression of a SNCA gene is important, especially if the particular region of complementarity in a SNCA gene is known to have polymorphic sequence variation within the population.

### II. Modified RNAi Agents of the Disclosure

[0212] In preferred embodiments, the RNA of an RNAi agent of the disclosure, e.g., a dsRNA, is chemically modified to enhance stability or other beneficial characteristics. In certain embodiments of the disclosure, substantially all of the nucleotides of an RNAi agent of the disclosure are modified. In other embodiments of the disclosure, all of the nucleotides of an RNAi agent of the disclosure are modified. RNAi agents of the disclosure in which “substantially all of the nucleotides are modified” are largely but not wholly modified and can include not more than 5, 4, 3, 2, or 1 unmodified nucleotides. In still other embodiments of the disclosure, RNAi agents of the disclosure can include not more than 5, 4, 3, 2 or 1 modified nucleotides.

[0213] The nucleic acids featured in the disclosure can be synthesized or modified by methods well established in the art, such as those described in “Current protocols in nucleic acid chemistry,” Beaucage, S. L. et al. (Edrs.), John Wiley & Sons, Inc., New York, NY, USA, which is hereby incorporated herein by reference. Modifications include, for example, end modifications, e.g., 5′-end modifications (phosphorylation, conjugation, inverted linkages) or 3′-end modifications (conjugation, DNA nucleotides, inverted linkages, etc.); base modifications, e.g., replacement with stabilizing bases, destabilizing bases, or bases that base pair with an expanded repertoire of partners, removal of bases (abasic nucleotides), or conjugated bases; sugar modifications (e.g., at the 2′-position or 4′-position) or replacement of the sugar; or backbone modifications, including modification or replacement of the phosphodiester linkages. Specific examples of RNAi agents useful in the embodiments described herein include, but are not limited to, RNAs containing modified backbones or no natural internucleoside linkages. RNAs having modified backbones include, among others, those that do not have a phosphorus atom in the backbone. For the purposes of this specification, and as sometimes referenced in the art, modified RNAs that do not have a phosphorus atom in their internucleoside backbone can also be considered to be oligonucleosides. In some embodiments, a modified RNAi agent will have a phosphorus atom in its internucleoside backbone.

[0214] Modified RNA backbones include, for example, phosphorothioates, chiral phosphorothioates, phosphorodithioates, phosphotriesters, aminoalkylphosphotriesters, methyl and other alkyl phosphonates including 3′-alkylene phosphonates and chiral phosphonates, phosphinates, phosphoramidates including 3′-amino phosphoramidate and aminoalkylphosphoramidates, thionophosphoramidates, thionoalkylphosphonates, thionoalkylphosphotriesters, and boranophosphates having normal 3′-5′ linkages, 2′-5′-linked analogs of these, and those having inverted polarity wherein the adjacent pairs of nucleoside units are linked 3′-5′ to 5′-3′ or 2′-5′ to 5′-2′. Various salts, e.g., sodium salts, mixed salts and free acid forms are also included.

[0215] Representative U.S. patents that teach the preparation of the above phosphorus-containing linkages include, but are not limited to, U.S. Pat. Nos. 3,687,808; 4,469,863; 4,476,301; 5,023,243; 5,177,195; 5,188,897; 5,264,423; 5,276,019; 5,278,302; 5,286,717; 5,321,131; 5,399,676; 5,405,939; 5,453,496; 5,455,233; 5,466,677; 5,476,925; 5,519,126; 5,536,821; 5,541,316; 5,550,111; 5,563,253; 5,571,799; 5,587,361; 5,625,050; 6,028,188; 6,124,445; 6,160,109; 6,169,170; 6,172,209; 6,239,265; 6,277,603; 6,326,199; 6,346,614; 6,444,423; 6,531,590; 6,534,639; 6,608,035; 6,683,167; 6,858,715; 6,867,294; 6,878,805; 7,015,315; 7,041,816; 7,273,933; 7,321,029; and U.S. Pat. RE39464, the entire contents of each of which are hereby incorporated herein by reference.

[0216] Modified RNA backbones that do not include a phosphorus atom therein have backbones that are formed by short chain alkyl or cycloalkyl internucleoside linkages, mixed heteroatoms and alkyl or cycloalkyl internucleoside linkages, or one or more short chain heteroatomic or heterocyclic internucleoside linkages. These include those having morpholino linkages (formed in part from the sugar portion of a nucleoside); siloxane backbones; sulfide, sulfoxide and sulfone backbones; formacetyl and thioformacetyl backbones; methylene formacetyl and thioformacetyl backbones; alkene containing backbones; sulfamate backbones; methyleneimino and methylenehydrazino backbones; sulfonate and sulfonamide backbones; amide backbones; and others having mixed N, O, S and CH₂ component parts.

[0217] Representative U.S. patents that teach the preparation of the above oligonucleosides include, but are not limited to, U.S. Pat. Nos. 5,034,506; 5,166,315; 5,185,444; 5,214,134; 5,216,141; 5,235,033; 5,64,562; 5,264,564; 5,405,938; 5,434,257; 5,466,677; 5,470,967; 5,489,677; 5,541,307; 5,561,225; 5,596,086; 5,602,240; 5,608,046; 5,610,289; 5,618,704; 5,623,070; 5,663,312; 5,633,360; 5,677,437; and, 5,677,439, the entire contents of each of which are hereby incorporated herein by reference.

[0218] In other embodiments, suitable RNA mimetics are contemplated for use in RNAi agents, in which both the sugar and the internucleoside linkage, i.e., the backbone, of the nucleotide units are replaced with novel groups. The base units are maintained for hybridization with an appropriate nucleic acid target compound. One such oligomeric compound, an RNA mimetic that has been shown to have excellent hybridization properties, is referred to as a peptide nucleic acid (PNA). In PNA compounds, the sugar backbone of an RNA is replaced with an amide containing backbone, in particular an aminoethylglycine backbone. The nucleobases are retained and are bound directly or indirectly to aza nitrogen atoms of the amide portion of the backbone. Representative U.S. patents that teach the preparation of PNA compounds include, but are not limited to, U.S. Pat. Nos. 5,539,082; 5,714,331; and 5,719,262, the entire contents of each of which are hereby incorporated herein by reference. Additional PNA compounds suitable for use in the RNAi agents of the disclosure are described in, for example, in Nielsen et al., Science, 1991, 254, 1497-1500.

[0219] Some embodiments featured in the disclosure include RNAs with phosphorothioate backbones and oligonucleosides with heteroatom backbones, and in particular —CH₂—NH—CH₂—, —CH₂—N(CH₃)—O—CH₂— [known as a methylene (methylimino) or MMI backbone], —CH₂—O—N(CH₃)—CH₂—, —CH₂—N(CH₃)—N(CH₃)—CH₂— and —N(CH₃)—CH₂—CH₂— [wherein the native phosphodiester backbone is represented as —O—P—O—CH₂—] of the above-referenced U.S. Pat. No. 5,489,677, and the amide backbones of the above-referenced U.S. Pat. No. 5,602,240. In some embodiments, the RNAs featured herein have morpholino backbone structures of the above-referenced U.S. Pat. No. 5,034,506.

[0220] Modified RNAs can also contain one or more substituted sugar moieties. The RNAi agents, e.g., dsRNAs, featured herein can include one of the following at the 2′-position: OH; F; O—, S—, or N-alkyl; O—, S—, or N-alkenyl; O—, S- or N-alkynyl; or O-alkyl-O-alkyl, wherein the alkyl, alkenyl and alkynyl can be substituted or unsubstituted C₁ to C₁₀ alkyl or C₂ to C₁₀ alkenyl and alkynyl. Exemplary suitable modifications include O[(CH₂)ₙO]ₘCH₃, O(CH₂)·ₙOCH₃, O(CH₂)ₙNH₂, O(CH₂)ₙCH₃, O(CH₂)ₙONH₂, and O(CH₂)ₙON[(CH₂),CH₃)]₂, where n and m are from 1 to about 10. In other embodiments, dsRNAs include one of the following at the 2′ position: C₁ to C₁₀ lower alkyl, substituted lower alkyl, alkaryl, aralkyl, O-alkaryl or O-aralkyl, SH, SCH₃, OCN, Cl, Br, CN, CF₃, OCF₃, SOCH₃, SO₂CH₃, ONO₂, NO₂, N₃, NH₂, heterocycloalkyl, heterocycloalkaryl, aminoalkylamino, polyalkylamino, substituted silyl, an RNA cleaving group, a reporter group, an intercalator, a group for improving the pharmacokinetic properties of an RNAi agent, or a group for improving the pharmacodynamic properties of an RNAi agent, and other substituents having similar properties. In some embodiments, the modification includes a 2′-methoxyethoxy (2′-O—CH₂CH₂OCH₃, also known as 2′-O-(2-methoxyethyl) or 2′-MOE) (Martin et al., Helv. Chim. Acta, 1995, 78: 486-504) i.e., an alkoxy-alkoxy group. Another exemplary modification is 2′-dimethylaminooxyethoxy, i.e., a O(CH₂)₂ON(CH₃)₂ group, also known as 2′-DMAOE, as described in examples herein below, and 2′-dimethylaminoethoxyethoxy (also known in the art as 2′-O-dimethylaminoethoxyethyl or 2′-DMAEOE), i.e., 2′-O—CH₂—O—CH₂—N(CH₂)₂. Further exemplary modifications include: 5′-Me-2′-F nucleotides, 5′-Me-2′-OMe nucleotides, 5′-Me-2′-deoxynucleotides, (both R and S isomers in these three families); 2′-alkoxyalkyl; and 2′-NMA (N-methylacetamide).

[0221] Other modifications include 2′-methoxy (2′-OCH₃), 2′-aminopropoxy (2′-OCH₂CH₂CH₂NH₂), 2′-O-hexadecyl, and 2′-fluoro (2′-F). Similar modifications can also be made at other positions on the RNA of an RNAi agent, particularly the 3′ position of the sugar on the 3′ terminal nucleotide or in 2′-5′ linked dsRNAs and the 5′ position of 5′ terminal nucleotide. RNAi agents can also have sugar mimetics such as cyclobutyl moieties in place of the pentofuranosyl sugar. Representative U.S. patents that teach the preparation of such modified sugar structures include, but are not limited to, U.S. Pat. Nos. 4,981,957; 5,118,800; 5,319,080; 5,359,044; 5,393,878; 5,446,137; 5,466,786; 5,514,785; 5,519,134; 5,567,811; 5,576,427; 5,591,722; 5,597,909; 5,610,300; 5,627,053; 5,639,873; 5,646,265; 5,658,873; 5,670,633; and 5,700,920, certain of which are commonly owned with the instant application. The entire contents of each of the foregoing are hereby incorporated herein by reference.

[0222] An RNAi agent of the disclosure can also include nucleobase (often referred to in the art simply as “base”) modifications or substitutions. As used herein, “unmodified” or “natural” nucleobases include the purine bases adenine (A) and guanine (G), and the pyrimidine bases thymine (T), cytosine (C) and uracil (U). Modified nucleobases include other synthetic and natural nucleobases such as 5-methylcytosine (5-me-C), 5-hydroxymethyl cytosine, xanthine, hypoxanthine, 2-aminoadenine, 6-methyl and other alkyl derivatives of adenine and guanine, 2-propyl and other alkyl derivatives of adenine and guanine, 2-thiouracil, 2-thiothymine and 2-thiocytosine, 5-halouracil and cytosine, 5-propynyl uracil and cytosine, 6-azo uracil, cytosine and thymine, 5-uracil (pseudouracil), 4-thiouracil, 8-halo, 8-amino, 8-thiol, 8-thioalkyl, 8-hydroxyl anal other 8-substituted adenines and guanines, 5-halo, particularly 5-bromo, 5-trifluoromethyl and other 5-substituted uracils and cytosines, 7-methylguanine and 7-methyladenine, 8-azaguanine and 8-azaadenine, 7-deazaguanine and 7-daazaadenine and 3-deazaguanine and 3-deazaadenine. Further nucleobases include those disclosed in U.S. Pat. No. 3,687,808, those disclosed in Modified Nucleosides in Biochemistry, Biotechnology and Medicine, Herdewijn, P. ed. Wiley-VCH, 2008; those disclosed in The Concise Encyclopedia Of Polymer Science And Engineering, pages 858-859, Kroschwitz, J. L, ed. John Wiley & Sons, 1990, these disclosed by Englisch et al., (1991) Angewandte Chemie, International Edition, 30: 613, and those disclosed by Sanghvi, Y S., Chapter 15, dsRNA Research and Applications, pages 289-302, Crooke, S. T. and Lebleu, B., Ed., CRC Press, 1993. Certain of these nucleobases are particularly useful for increasing the binding affinity of the oligomeric compounds featured in the disclosure. These include 5-substituted pyrimidines, 6-azapyrimidines and N-2, N-6 and 0-6 substituted purines, including 2-aminopropyladenine, 5-propynyluracil and 5-propynylcytosine. 5-methylcytosine substitutions have been shown to increase nucleic acid duplex stability by 0.6-1.2° C. (Sanghvi, Y. S., Crooke, S. T. and Lebleu, B., Eds., dsRNA Research and Applications, CRC Press, Boca Raton, 1993, pp. 276-278) and are exemplary base substitutions, even more particularly when combined with 2′-O-methoxyethyl sugar modifications.

[0223] Representative U.S. patents that teach the preparation of certain of the above noted modified nucleobases as well as other modified nucleobases include, but are not limited to, the above noted U.S. Pat. Nos. 3,687,808, 4,845,205; 5,130,30; 5,134,066; 5,175,273; 5,367,066; 5,432,272; 5,457,187; 5,459,255; 5,484,908; 5,502,177; 5,525,711; 5,552,540; 5,587,469; 5,594,121, 5,596,091; 5,614,617; 5,681,941; 5,750,692; 6,015,886; 6,147,200; 6,166,197; 6,222,025; 6,235,887; 6,380,368; 6,528,640; 6,639,062; 6,617,438; 7,045,610; 7,427,672; and 7,495,088, the entire contents of each of which are hereby incorporated herein by reference.

[0224] An RNAi agent of the disclosure can also be modified to include one or more locked nucleic acids (LNA). A locked nucleic acid is a nucleotide having a modified ribose moiety in which the ribose moiety comprises an extra bridge connecting the 2′ and 4′ carbons. This structure effectively “locks” the ribose in the 3′-endo structural conformation. The addition of locked nucleic acids to siRNAs has been shown to increase siRNA stability in serum, and to reduce off-target effects (Elmen, J. et al., (2005) Nucleic Acids Research 33(1): 439-447; Mook, OR. et al., (2007) Mol Canc Ther 6(3): 833-843; Grunweller, A. et al., (2003) Nucleic Acids Research 31(12): 3185-3193).

[0225] An RNAi agent of the disclosure can also be modified to include one or more bicyclic sugar moities. A “bicyclic sugar” is a furanosyl ring modified by the bridging of two atoms. A “bicyclic nucleoside” (“BNA”) is a nucleoside having a sugar moiety comprising a bridge connecting two carbon atoms of the sugar ring, thereby forming a bicyclic ring system. In certain embodiments, the bridge connects the 4′-carbon and the 2′-carbon of the sugar ring. Thus, in some embodiments an agent of the disclosure may include one or more locked nucleic acids (LNA). A locked nucleic acid is a nucleotide having a modified ribose moiety in which the ribose moiety comprises an extra bridge connecting the 2′ and 4′ carbons. In other words, an LNA is a nucleotide comprising a bicyclic sugar moiety comprising a 4′-CH2-O-2′ bridge. This structure effectively “locks” the ribose in the 3′-endo structural conformation. The addition of locked nucleic acids to siRNAs has been shown to increase siRNA stability in serum, and to reduce off-target effects (Elmen, J. et al., (2005) Nucleic Acids Research 33(1): 439-447; Mook, OR. et al., (2007) Mol Canc Ther 6(3): 833-843; Grunweller, A. et al., (2003) Nucleic Acids Research 31(12): 3185-3193). Examples of bicyclic nucleosides for use in the polynucleotides of the disclosure include without limitation nucleosides comprising a bridge between the 4′ and the 2′ ribosyl ring atoms. In certain embodiments, the antisense polynucleotide agents of the disclosure include one or more bicyclic nucleosides comprising a 4′ to 2′ bridge. Examples of such 4′ to 2′ bridged bicyclic nucleosides, include but are not limited to 4′-(CH2)-O-2′ (LNA); 4′-(CH2)-S-2′; 4′-(CH2)2-O-2′ (ENA); 4′-CH(CH3)-O-2′ (also referred to as “constrained ethyl” or “cEt”) and 4′-CH(CH2OCH3)-O-2′ (and analogs thereof; see, e.g., U.S. Pat. No. 7,399,845); 4′-C(CH3)(CH3)-O-2′ (and analogs thereof; see e.g., U.S. Pat. No. 8,278,283); 4′-CH2-N(OCH3)-2′ (and analogs thereof; see e.g., U.S. Pat. No. 8,278,425); 4′-CH2-O—N(CH3)-2′ (see, e.g., U.S. Patent Publication No. 2004/0171570); 4′-CH2-N(R)—O-2′, wherein R is H, C1-C12 alkyl, or a protecting group (see, e.g., U.S. Pat. No. 7,427,672); 4′-CH2-C(H)(CH3)-2′ (see, e.g., Chattopadhyaya et al., J. Org. Chem., 2009, 74, 118-134); and 4′-CH2-C(═CH2)-2′ (and analogs thereof; see, e.g., U.S. Pat. No. 8,278,426). The entire contents of each of the foregoing are hereby incorporated herein by reference.

[0226] Additional representative US patents and US patenttent Publications that teach the preparation of locked nucleic acid nucleotides include, but are not limited to, the following: U.S. Pat. Nos. 6,268,490; 6,525,191; 6,670,461; 6,770,748; 6,794,499; 6,998,484; 7,053,207; 7,034,133; 7,084,125; 7,399,845; 7,427,672; 7,569,686; 7,741,457; 8,022,193; 8,030,467; 8,278,425; 8,278,426; 8,278,283; US 2008/0039618; and US 2009/0012281, the entire contents of each of which are hereby incorporated herein by reference.

[0227] Any of the foregoing bicyclic nucleosides can be prepared having one or more stereochemical sugar configurations including for example α-L-ribofuranose and 3-D-ribofuranose (see WO 99/14226).

[0228] An RNAi agent of the disclosure can also be modified to include one or more constrained ethyl nucleotides. As used herein, a “constrained ethyl nucleotide” or “cEt” is a locked nucleic acid comprising a bicyclic sugar moiety comprising a 4′-CH(CH3)-0-2′ bridge. In one embodiment, a constrained ethyl nucleotide is in the S conformation referred to herein as “S-cEt.”

[0229] An RNAi agent of the disclosure may also include one or more “conformationally restricted nucleotides” (“CRN”). CRN are nucleotide analogs with a linker connecting the C2′ and C4′ carbons of ribose or the C3′ and C5′ carbons of ribose. CRN lock the ribose ring into a stable conformation and increase the hybridization affinity to mRNA. The linker is of sufficient length to place the oxygen in an optimal position for stability and affinity resulting in less ribose ring puckering.

[0230] Representative publications that teach the preparation of certain of the above noted CRN include, but are not limited to, US 2013/0190383; and WO 2013/036868, the entire contents of each of which are hereby incorporated herein by reference.

[0231] In some embodiments, an RNAi agent of the disclosure comprises one or more monomers that are UNA (unlocked nucleic acid) nucleotides. UNA is unlocked acyclic nucleic acid, wherein any of the bonds of the sugar has been removed, forming an unlocked “sugar” residue. In one example, UNA also encompasses monomer with bonds between C1′-C4′ have been removed (i.e. the covalent carbon-oxygen-carbon bond between the C1′ and C4′ carbons). In another example, the C2′-C3′ bond (i.e. the covalent carbon-carbon bond between the C2′ and C3′ carbons) of the sugar has been removed (see Nuc. Acids Symp. Series, 52, 133-134 (2008) and Fluiter et al., Mol. Biosyst., 2009, 10, 1039 hereby incorporated by reference).

[0232] Representative U.S. publications that teach the preparation of UNA include, but are not limited to, U.S. Pat. No. 8,314,227; and US Patent Publication Nos. 2013/0096289; 2013/0011922; and 2011/0313020, the entire contents of each of which are hereby incorporated herein by reference.

[0233] Potentially stabilizing modifications to the ends of RNA molecules can include N-(acetylaminocaproyl)-4-hydroxyprolinol (Hyp-C6-NHAc), N-(caproyl-4-hydroxyprolinol (Hyp-C6), N-(acetyl-4-hydroxyprolinol (Hyp-NHAc), thymidine-2′-O-deoxythymidine (ether), N-(aminocaproyl)-4-hydroxyprolinol (Hyp-C6-amino), 2-docosanoyl-uridine-3′-phosphate, inverted 2′-deoxy-modified ribonucleotide, such as inverted dT(idT), inverted dA (idA), and inverted abasic 2′-deoxyribonucleotide (iAb) and others. Disclosure of this modification can be found in WO 2011/005861.

[0234] In one example, the 3′ or 5′ terminal end of an oligonucleotide is linked to an inverted 2′-deoxy-modified ribonucleotide, such as inverted dT(idT), inverted dA (idA), or an inverted abasic 2′-deoxyribonucleotide (iAb). In one particular example, the inverted 2′-deoxy-modified ribonucleotide is linked to the 3′end of an oligonucleotide, such as the 3′-end of a sense strand described herein, where the linking is via a 3′-3′ phosphodiester linkage or a 3′-3′-phosphorothioate linkage.

[0235] In another example, the 3′-end of a sense strand is linked via a 3′-3′-phosphorothioate linkage to an inverted abasic ribonucleotide (iAb). In another example, the 3′-end of a sense strand is linked via a 3′-3′-phosphorothioate linkage to an inverted dA (idA).

[0236] In one particular example, the inverted 2′-deoxy-modified ribonucleotide is linked to the 3′end of an oligonucleotide, such as the 3′-end of a sense strand described herein, where the linking is via a 3′-3′ phosphodiester linkage or a 3′-3′-phosphorothioate linkage.

[0237] In another example, the 3′-terminal nucleotides of a sense strand is an inverted dA (idA) and is linked to the preceding nucleotide via a 3′-3′-linkage (e.g., 3′-3′-phosphorothioate linkage).

[0238] Other modifications of an RNAi agent of the disclosure include a 5′ phosphate or 5′ phosphate mimic, e.g., a 5′-terminal phosphate or phosphate mimic on the antisense strand of an RNAi agent. Suitable phosphate mimics are disclosed in, for example US 2012/0157511, the entire contents of which are incorporated herein by reference.

### A. Modified RNAi Agents Comprising Motifs of the Disclosure

[0239] In certain aspects of the disclosure, the double-stranded RNAi agents of the disclosure include agents with chemical modifications as disclosed, for example, in WO 2013/075035, the entire contents of which are incorporated herein by reference. As shown herein and in WO 2013/075035, a superior result may be obtained by introducing one or more motifs of three identical modifications on three consecutive nucleotides into a sense strand or antisense strand of an RNAi agent, particularly at or near the cleavage site. In some embodiments, the sense strand and antisense strand of the RNAi agent may otherwise be completely modified. The introduction of these motifs interrupts the modification pattern, if present, of the sense or antisense strand. The RNAi agent may be optionally conjugated with a lipophilic ligand, e.g., a C16 ligand, for instance on the sense strand. The RNAi agent may be optionally modified with a (S)-glycol nucleic acid (GNA) modification, for instance on one or more residues of the antisense strand. The resulting RNAi agents present superior gene silencing activity.

[0240] Accordingly, the disclosure provides double stranded RNAi agents capable of inhibiting the expression of a target gene (i.e., a SNCA gene) in vivo. The RNAi agent comprises a sense strand and an antisense strand. Each strand of the RNAi agent may be 15-30 nucleotides in length. For example, each strand may be 16-30 nucleotides in length, 17-30 nucleotides in length, 25-30 nucleotides in length, 27-30 nucleotides in length, 17-23 nucleotides in length, 17-21 nucleotides in length, 17-19 nucleotides in length, 19-25 nucleotides in length, 19-23 nucleotides in length, 19-21 nucleotides in length, 21-25 nucleotides in length, or 21-23 nucleotides in length. In certain embodiments, each strand is 19-23 nucleotides in length.

[0241] The sense strand and antisense strand typically form a duplex double stranded RNA (“dsRNA”), also referred to herein as an “RNAi agent.” The duplex region of an RNAi agent may be 15-30 nucleotide pairs in length. For example, the duplex region can be 16-30 nucleotide pairs in length, 17-30 nucleotide pairs in length, 27-30 nucleotide pairs in length, 17-23 nucleotide pairs in length, 17-21 nucleotide pairs in length, 17-19 nucleotide pairs in length, 19-25 nucleotide pairs in length, 19-23 nucleotide pairs in length, 19-21 nucleotide pairs in length, 21-25 nucleotide pairs in length, or 21-23 nucleotide pairs in length. In another example, the duplex region is selected from 15, 16, 17, 18, 19, 20, 21, 22, 23, 24, 25, 26, and 27 nucleotides in length. In preferred embodiments, the duplex region is 19-21 nucleotide pairs in length.

[0242] In one embodiment, the RNAi agent may contain one or more overhang regions or capping groups at the 3′-end, 5′-end, or both ends of one or both strands. The overhang can be 1-6 nucleotides in length, for instance 2-6 nucleotides in length, 1-5 nucleotides in length, 2-5 nucleotides in length, 1-4 nucleotides in length, 2-4 nucleotides in length, 1-3 nucleotides in length, 2-3 nucleotides in length, or 1-2 nucleotides in length. In preferred embodiments, the nucleotide overhang region is 2 nucleotides in length. The overhangs can be the result of one strand being longer than the other, or the result of two strands of the same length being staggered. The overhang can form a mismatch with the target mRNA or it can be complementary to the gene sequences being targeted or can be another sequence. The first and second strands can also be joined, e.g., by additional bases to form a hairpin, or by other non-base linkers.

[0243] In one embodiment, the nucleotides in the overhang region of the RNAi agent can each independently be a modified or unmodified nucleotide including, but no limited to 2′-sugar modified, such as, 2′-F, 2′-O-methyl, thymidine (T), and any combinations thereof.

[0244] For example, TT can be an overhang sequence for either end on either strand. The overhang can form a mismatch with the target mRNA or it can be complementary to the gene sequences being targeted or can be another sequence.

[0245] The 5′- or 3′-overhangs at the sense strand, antisense strand or both strands of the RNAi agent may be phosphorylated. In some embodiments, the overhang region(s) contains two nucleotides having a phosphorothioate between the two nucleotides, where the two nucleotides can be the same or different. In one embodiment, the overhang is present at the 3′-end of the sense strand, antisense strand, or both strands. In one embodiment, this 3′-overhang is present in the antisense strand. In one embodiment, this 3′-overhang is present in the sense strand.

[0246] The RNAi agent may contain only a single overhang, which can strengthen the interference activity of the RNAi, without affecting its overall stability. For example, the single-stranded overhang may be located at the 3′-terminal end of the sense strand or, alternatively, at the 3′-terminal end of the antisense strand. The RNAi may also have a blunt end, located at the 5′-end of the antisense strand (or the 3′-end of the sense strand) or vice versa. Generally, the antisense strand of the RNAi has a nucleotide overhang at the 3′-end, and the 5′-end is blunt. While not wishing to be bound by theory, the asymmetric blunt end at the 5′-end of the antisense strand and 3′-end overhang of the antisense strand favor the guide strand loading into RISC process.

[0247] In one embodiment, the RNAi agent is a double ended bluntmer of 19 nucleotides in length, wherein the sense strand contains at least one motif of three 2′-F modifications on three consecutive nucleotides at positions 7, 8, 9 from the 5′end. The antisense strand contains at least one motif of three 2′-O-methyl modifications on three consecutive nucleotides at positions 11, 12, 13 from the 5′end.

[0248] In another embodiment, the RNAi agent is a double ended bluntmer of 20 nucleotides in length, wherein the sense strand contains at least one motif of three 2′-F modifications on three consecutive nucleotides at positions 8, 9, 10 from the 5′end. The antisense strand contains at least one motif of three 2′-O-methyl modifications on three consecutive nucleotides at positions 11, 12, 13 from the 5′end.

[0249] In yet another embodiment, the RNAi agent is a double ended bluntmer of 21 nucleotides in length, wherein the sense strand contains at least one motif of three 2′-F modifications on three consecutive nucleotides at positions 9, 10, 11 from the 5′end. The antisense strand contains at least one motif of three 2′-O-methyl modifications on three consecutive nucleotides at positions 11, 12, 13 from the 5′end.

[0250] In one embodiment, the RNAi agent comprises a 21 nucleotide sense strand and a 23 nucleotide antisense strand, wherein the sense strand contains at least one motif of three 2′-F modifications on three consecutive nucleotides at positions 9, 10, 11 from the 5′end; the antisense strand contains at least one motif of three 2′-O-methyl modifications on three consecutive nucleotides at positions 11, 12, 13 from the 5′end, wherein one end of the RNAi agent is blunt, while the other end comprises a 2 nucleotide overhang. Optionally, the 2 nucleotide overhang is at the 3′-end of the antisense strand. When the 2 nucleotide overhang is at the 3′-end of the antisense strand, there may be two phosphorothioate internucleotide linkages between the terminal three nucleotides, wherein two of the three nucleotides are the overhang nucleotides, and the third nucleotide is a paired nucleotide next to the overhang nucleotide. In one embodiment, the RNAi agent additionally has two phosphorothioate internucleotide linkages between the terminal three nucleotides at both the 5′-end of the sense strand and at the 5′-end of the antisense strand. In one embodiment, every nucleotide in the sense strand and the antisense strand of the RNAi agent, including the nucleotides that are part of the motifs are modified nucleotides. In one embodiment each residue is independently modified with a 2′-O-methyl or 3′-fluoro, e.g., in an alternating motif. Optionally, the RNAi agent further comprises a ligand (e.g., a lipophilic ligand, optionally a C16 ligand).

[0251] In one embodiment, the RNAi agent comprises a sense and an antisense strand, wherein the sense strand is 25-30 nucleotide residues in length, wherein starting from the 5′ terminal nucleotide (position 1) positions 1 to 23 of the first strand comprise at least 8 ribonucleotides; the antisense strand is 36-66 nucleotide residues in length and, starting from the 3′ terminal nucleotide, comprises at least 8 ribonucleotides in the positions paired with positions 1-23 of sense strand to form a duplex; wherein at least the 3′ terminal nucleotide of antisense strand is unpaired with sense strand, and up to 6 consecutive 3′ terminal nucleotides are unpaired with sense strand, thereby forming a 3′ single stranded overhang of 1-6 nucleotides; wherein the 5′ terminus of antisense strand comprises from 10-30 consecutive nucleotides which are unpaired with sense strand, thereby forming a 10-30 nucleotide single stranded 5′ overhang; wherein at least the sense strand 5′ terminal and 3′ terminal nucleotides are base paired with nucleotides of antisense strand when sense and antisense strands are aligned for maximum complementarity, thereby forming a substantially duplexed region between sense and antisense strands; and antisense strand is sufficiently complementary to a target RNA along at least 19 ribonucleotides of antisense strand length to reduce target gene expression when the double stranded nucleic acid is introduced into a mammalian cell; and wherein the sense strand contains at least one motif of three 2′-F modifications on three consecutive nucleotides, where at least one of the motifs occurs at or near the cleavage site. The antisense strand contains at least one motif of three 2′-O-methyl modifications on three consecutive nucleotides at or near the cleavage site.

[0252] In one embodiment, the RNAi agent comprises sense and antisense strands, wherein the RNAi agent comprises a first strand having a length which is at least 25 and at most 29 nucleotides and a second strand having a length which is at most 30 nucleotides with at least one motif of three 2′-O-methyl modifications on three consecutive nucleotides at position 11, 12, 13 from the 5′ end; wherein the 3′ end of the first strand and the 5′ end of the second strand form a blunt end and the second strand is 1-4 nucleotides longer at its 3′ end than the first strand, wherein the duplex region which is at least 25 nucleotides in length, and the second strand is sufficiently complementary to a target mRNA along at least 19 nucleotide of the second strand length to reduce target gene expression when the RNAi agent is introduced into a mammalian cell, and wherein dicer cleavage of the RNAi agent preferentially results in an siRNA comprising the 3′ end of the second strand, thereby reducing expression of the target gene in the mammal. Optionally, the RNAi agent further comprises a ligand.

[0253] In one embodiment, the sense strand of the RNAi agent contains at least one motif of three identical modifications on three consecutive nucleotides, where one of the motifs occurs at the cleavage site in the sense strand.

[0254] In one embodiment, the antisense strand of the RNAi agent can also contain at least one motif of three identical modifications on three consecutive nucleotides, where one of the motifs occurs at or near the cleavage site in the antisense strand.

[0255] For an RNAi agent having a duplex region of 17-23 nucleotide in length, the cleavage site of the antisense strand is typically around the 10, 11 and 12 positions from the 5′-end. Thus the motifs of three identical modifications may occur at the 9, 10, 11 positions; 10, 11, 12 positions; 11, 12, 13 positions; 12, 13, 14 positions; or 13, 14, 15 positions of the antisense strand, the count starting from the 1^{st} nucleotide from the 5′-end of the antisense strand, or, the count starting from the 1^{st} paired nucleotide within the duplex region from the 5′-end of the antisense strand. The cleavage site in the antisense strand may also change according to the length of the duplex region of the RNAi from the 5′-end.

[0256] The sense strand of the RNAi agent may contain at least one motif of three identical modifications on three consecutive nucleotides at the cleavage site of the strand; and the antisense strand may have at least one motif of three identical modifications on three consecutive nucleotides at or near the cleavage site of the strand. When the sense strand and the antisense strand form a dsRNA duplex, the sense strand and the antisense strand can be so aligned that one motif of the three nucleotides on the sense strand and one motif of the three nucleotides on the antisense strand have at least one nucleotide overlap, i.e., at least one of the three nucleotides of the motif in the sense strand forms a base pair with at least one of the three nucleotides of the motif in the antisense strand. Alternatively, at least two nucleotides may overlap, or all three nucleotides may overlap.

[0257] In one embodiment, the sense strand of the RNAi agent may contain more than one motif of three identical modifications on three consecutive nucleotides. The first motif may occur at or near the cleavage site of the strand and the other motifs may be a wing modification. The term “wing modification” herein refers to a motif occurring at another portion of the strand that is separated from the motif at or near the cleavage site of the same strand. The wing modification is either adjacent to the first motif or is separated by at least one or more nucleotides. When the motifs are immediately adjacent to each other, the chemistry of the motifs are distinct from each other; and when the motifs are separated by one or more nucleotide, the chemistries can be the same or different. Two or more wing modifications may be present. For instance, when two wing modifications are present, each wing modification may occur at one end relative to the first motif which is at or near cleavage site or on either side of the lead motif.

[0258] Like the sense strand, the antisense strand of the RNAi agent may contain more than one motif of three identical modifications on three consecutive nucleotides, with at least one of the motifs occurring at or near the cleavage site of the strand. This antisense strand may also contain one or more wing modifications in an alignment similar to the wing modifications that may be present on the sense strand.

[0259] In one embodiment, the wing modification on the sense strand or antisense strand of the RNAi agent typically does not include the first one or two terminal nucleotides at the 3′-end, 5′-end or both ends of the strand.

[0260] In another embodiment, the wing modification on the sense strand or antisense strand of the RNAi agent typically does not include the first one or two paired nucleotides within the duplex region at the 3′-end, 5′-end or both ends of the strand.

[0261] When the sense strand and the antisense strand of the RNAi agent each contain at least one wing modification, the wing modifications may fall on the same end of the duplex region, and have an overlap of one, two or three nucleotides.

[0262] When the sense strand and the antisense strand of the RNAi agent each contain at least two wing modifications, the sense strand and the antisense strand can be so aligned that two modifications each from one strand fall on one end of the duplex region, having an overlap of one, two or three nucleotides; two modifications each from one strand fall on the other end of the duplex region, having an overlap of one, two or three nucleotides; two modifications one strand fall on each side of the lead motif, having an overlap of one, two, or three nucleotides in the duplex region.

[0263] In one embodiment, the RNAi agent comprises mismatch(es) with the target, within the duplex, or combinations thereof. The mismatch may occur in the overhang region or the duplex region. The base pair may be ranked on the basis of their propensity to promote dissociation or melting (e.g., on the free energy of association or dissociation of a particular pairing, the simplest approach is to examine the pairs on an individual pair basis, though next neighbor or similar analysis can also be used). In terms of promoting dissociation: A:U is preferred over G:C; G:U is preferred over G:C; and J:C (I=inosine) is preferred over G:C. Mismatches, e.g., non-canonical or other than canonical pairings (as described elsewhere herein) are preferred over canonical (A:T, A:U, G:C) pairings; and pairings which include a universal base are preferred over canonical pairings.

[0264] In one embodiment, the RNAi agent comprises at least one of the first 1, 2, 3, 4, or 5 base pairs within the duplex regions from the 5′-end of the antisense strand independently selected from the group of: A:U, G:U, J:C, and mismatched pairs, e.g., non-canonical or other than canonical pairings or pairings which include a universal base, to promote the dissociation of the antisense strand at the 5′-end of the duplex.

[0265] In one embodiment, the nucleotide at the 1 position within the duplex region from the 5′-end in the antisense strand is selected from the group consisting of A, dA, dU, U, and dT. Alternatively, at least one of the first 1, 2 or 3 base pair within the duplex region from the 5′-end of the antisense strand is an AU base pair. For example, the first base pair within the duplex region from the 5′-end of the antisense strand is an AU base pair.

[0266] In another embodiment, the nucleotide at the 3′-end of the sense strand is deoxy-thymine (dT). In another embodiment, the nucleotide at the 3′-end of the antisense strand is deoxy-thymine (dT). In one embodiment, there is a short sequence of deoxy-thymine nucleotides, for example, two dT nucleotides on the 3′-end of the sense or antisense strand.

[0267] In one embodiment, the sense strand sequence may be represented by formula (I):

5′ nₚ-Nₐ-(X X X)ᵢ-N_{b}-Y Y Y-N_{b}-(Z Z Z)ⱼ-Nₐ-n_{q} 3′ (I)

[0268] wherein:
[0269] i and j are each independently 0 or 1;
[0270] p and q are each independently 0-6;
[0271] each Nₐ independently represents an oligonucleotide sequence comprising 0-25 modified nucleotides, each sequence comprising at least two differently modified nucleotides;
[0272] each N_{b} independently represents an oligonucleotide sequence comprising 0-10 modified nucleotides;
[0273] each nₚ and n_{q} independently represent an overhang nucleotide;
[0274] wherein N_{b} and Y do not have the same modification; and
[0275] XXX, YYY and ZZZ each independently represent one motif of three identical modifications on three consecutive nucleotides. Optionally YYY is all 2′-F modified nucleotides.

[0276] In one embodiment, the Nₐ or N_{b} comprise modifications of alternating pattern.

[0277] In one embodiment, the YYY motif occurs at or near the cleavage site of the sense strand. For example, when the RNAi agent has a duplex region of 17-23 nucleotides in length, the YYY motif can occur at or the vicinity of the cleavage site (e.g.: can occur at positions 6, 7, 8, 7, 8, 9, 8, 9, 10, 9, 10, 11, 10, 11,12 or 11, 12, 13) of—the sense strand, the count starting from the 1^{st} nucleotide, from the 5′-end; or optionally, the count starting at the 1^{st} paired nucleotide within the duplex region, from the 5′-end.

[0278] In one embodiment, i is 1 and j is 0, or i is 0 and j is 1, or both i and j are 1. The sense strand can therefore be represented by the following formulas:

(Ib)
5′ nₚ-Nₐ-YYY-N_{b}-ZZZ-Nₐ-n_{q} 3′;
(Ic)
5′ nₚ-Nₐ-XXX-N_{b}-YYY-Nₐ-n_{q} 3′;
or
(Id)
5′ nₚ-Nₐ-XXX-N_{b}-YYY-N_{b}-ZZZ-Nₐ-n_{q} 3′.

[0279] When the sense strand is represented by formula (Ib), N_{b} represents an oligonucleotide sequence comprising 0-10, 0-7, 0-5, 0-4, 0-2 or 0 modified nucleotides.

[0280] Each Nₐ independently can represent an oligonucleotide sequence comprising 2-20, 2-15, or 2-10 modified nucleotides.

[0281] When the sense strand is represented as formula (Ic), N_{b} represents an oligonucleotide sequence comprising 0-10, 0-7, 0-10, 0-7, 0-5, 0-4, 0-2 or 0 modified nucleotides. Each Nₐ can independently represent an oligonucleotide sequence comprising 2-20, 2-15, or 2-10 modified nucleotides.

[0282] When the sense strand is represented as formula (Id), each N_{b} independently represents an oligonucleotide sequence comprising 0-10, 0-7, 0-5, 0-4, 0-2 or 0 modified nucleotides. Optionally, N_{b} is 0, 1, 2, 3, 4, 5 or 6. Each Nₐ can independently represent an oligonucleotide sequence comprising 2-20, 2-15, or 2-10 modified nucleotides.

[0283] Each of X, Y and Z may be the same or different from each other.

[0284] In other embodiments, i is 0 and j is 0, and the sense strand may be represented by the formula:

(Ia)
5′ nₚ-Nₐ-YYY-Nₐ-n_{q} 3′.

[0285] When the sense strand is represented by formula (Ia), each Nₐ independently can represent an oligonucleotide sequence comprising 2-20, 2-15, or 2-10 modified nucleotides.

[0286] In one embodiment, the antisense strand sequence of the RNAi may be represented by formula (II):

(II)
5′ n_{q′}-Nₐ′-(Z′Z′Z′)ₖ-N_{b}′-Y′Y′Y′-
N_{b}′-(X′X′X′)ₗ-N′ₐ-nₚ′ 3′

[0287] wherein:
[0288] k and l are each independently 0 or 1;
[0289] p′ and q′ are each independently 0-6;
[0290] each Nₐ′ independently represents an oligonucleotide sequence comprising 0-25 modified nucleotides, each sequence comprising at least two differently modified nucleotides;
[0291] each N_{b}′ independently represents an oligonucleotide sequence comprising 0-10 modified nucleotides;
[0292] each nₚ′ and n_{q}′ independently represent an overhang nucleotide;
[0293] wherein N_{b}′ and Y′ do not have the same modification;
[0294] and
[0295] X′X′X′, Y′Y′Y′ and Z′Z′Z′ each independently represent one motif of three identical modifications on three consecutive nucleotides.
   In one embodiment, the Nₐ′ or N_{b}′ comprise modifications of alternating pattern.

[0296] The Y′Y′Y′ motif occurs at or near the cleavage site of the antisense strand. For example, when the RNAi agent has a duplex region of 17-23 nucleotidein length, the Y′Y′Y′ motif can occur at positions 9, 10, 11; 10, 11, 12; 11, 12, 13; 12, 13, 14; or 13, 14, 15 of the antisense strand, with the count starting from the 1^{st} nucleotide, from the 5′-end; or optionally, the count starting at the 1^{st} paired nucleotide within the duplex region, from the 5′-end. Optionally, the Y′Y′Y′ motif occurs at positions 11, 12, 13.

[0297] In one embodiment, Y′Y′Y′ motif is all 2′-OMe modified nucleotides.

[0298] In one embodiment, k is 1 and 1 is 0, or k is 0 and 1 is 1, or both k and 1 are 1.

[0299] The antisense strand can therefore be represented by the following formulas:

(IIb)
5′ n_{q′}-Nₐ′-Z′Z′Z′-N_{b}′-Y′Y′Y′-Nₐ′-n_{p′} 3′;
(IIc)
5′ n_{q′}-Nₐ′-Y′Y′Y′-N_{b}′-X′X′X′-n_{p′} 3′;
or
(IId)
5′ n_{q′}-Nₐ′-Z′Z′Z′-N_{b}′-Y′Y′Y′-N_{b}′-X′X′X′-
Nₐ′-n_{p′} 3′.

[0300] When the antisense strand is represented by formula (IIb), N_{b}′ represents an oligonucleotide sequence comprising 0-10, 0-7, 0-10, 0-7, 0-5, 0-4, 0-2 or 0 modified nucleotides. Each Nₐ′ independently represents an oligonucleotide sequence comprising 2-20, 2-15, or 2-10 modified nucleotides.

[0301] When the antisense strand is represented as formula (IIc), N_{b}′ represents an oligonucleotide sequence comprising 0-10, 0-7, 0-10, 0-7, 0-5, 0-4, 0-2 or 0 modified nucleotides. Each Nₐ′ independently represents an oligonucleotide sequence comprising 2-20, 2-15, or 2-10 modified nucleotides.

[0302] When the antisense strand is represented as formula (IId), each N_{b}′ independently represents an oligonucleotide sequence comprising 0-10, 0-7, 0-10, 0-7, 0-5, 0-4, 0-2 or 0 modified nucleotides. Each Nₐ′ independently represents an oligonucleotide sequence comprising 2-20, 2-15, or 2-10 modified nucleotides. Optionally, N_{b} is 0, 1, 2, 3, 4, 5 or 6.

[0303] In other embodiments, k is 0 and 1 is 0 and the antisense strand may be represented by the formula:

(Ia)
5′ n_{p′}-Nₐ′-Y′Y′Y′-N_{a′}-n_{q′} 3′.

[0304] When the antisense strand is represented as formula (IIa), each Nₐ′ independently represents an oligonucleotide sequence comprising 2-20, 2-15, or 2-10 modified nucleotides.

[0305] Each of X′, Y′ and Z′ may be the same or different from each other.

[0306] Each nucleotide of the sense strand and antisense strand may be independently modified with LNA, HNA, CeNA, 2′-methoxyethyl, 2′-O-methyl, 2′-O-allyl, 2′-C-allyl, 2′-hydroxyl, or 2′-fluoro. For example, each nucleotide of the sense strand and antisense strand is independently modified with 2′-O-methyl or 2′-fluoro. Each X, Y, Z, X′, Y′ and Z′, in particular, may represent a 2′-O-methyl modification or a 2′-fluoro modification.

[0307] In one embodiment, the sense strand of the RNAi agent may contain YYY motif occurring at 9, 10 and 11 positions of the strand when the duplex region is 21 nt, the count starting from the 1^{st} nucleotide from the 5′-end, or optionally, the count starting at the 1^{st} paired nucleotide within the duplex region, from the 5′-end; and Y represents 2′-F modification. The sense strand may additionally contain XXX motif or ZZZ motifs as wing modifications at the opposite end of the duplex region; and XXX and ZZZ each independently represents a 2′-OMe modification or 2′-F modification.

[0308] In one embodiment the antisense strand may contain Y′Y′Y′ motif occurring at positions 11, 12, 13 of the strand, the count starting from the 1^{st} nucleotide from the 5′-end, or optionally, the count starting at the 1^{st} paired nucleotide within the duplex region, from the 5′-end; and Y′ represents 2′-O-methyl modification. The antisense strand may additionally contain X′X′X′ motif or Z′Z′Z′ motifs as wing modifications at the opposite end of the duplex region; and X′X′X′ and Z′Z′Z′ each independently represents a 2′-OMe modification or 2′-F modification.

[0309] The sense strand represented by any one of the above formulas (Ia), (Ib), (Ic), and (Id) forms a duplex with an antisense strand being represented by any one of formulas (IIa), (IIb), (IIc), and (IId), respectively.

[0310] Accordingly, the RNAi agents for use in the methods of the disclosure may comprise a sense strand and an antisense strand, each strand having 14 to 30 nucleotides, the RNAi duplex represented by formula (III):

(III)
sense:
5′ nₚ-Nₐ-(X X X)ᵢ-N_{b}-Y Y Y-N_{b}-(Z Z Z)ⱼ-Nₐ-n_{q} 3′
antisense:
3′ nₚ-Nₐ-(X′X′X′)ₖ-N_{b}-Y′Y′Y′-N_{b}-(Z′Z′Z′)ₗ-Nₐ-n_{q} 5′

[0311] wherein:
[0312] i, j, k, and 1 are each independently 0 or 1;
[0313] p, p′, q, and q′ are each independently 0-6;
[0314] each Nₐ and Nₐ′ independently represents an oligonucleotide sequence comprising 0-25 modified nucleotides, each sequence comprising at least two differently modified nucleotides;
[0315] each N_{b} and N_{b}′ independently represents an oligonucleotide sequence comprising 0-10 modified nucleotides;
[0316] wherein
[0317] each nₚ′, nₚ, n_{q}′, and n_{q}, each of which may or may not be present, independently represents an overhang nucleotide; and
[0318] XXX, YYY, ZZZ, X′X′X′, Y′Y′Y′, and Z′Z′Z′ each independently represent one motif of three identical modifications on three consecutive nucleotides.

[0319] In one embodiment, i is 0 and j is 0; or i is 1 and j is 0; or i is 0 and j is 1; or both i and j are 0; or both i and j are 1. In another embodiment, k is 0 and 1 is 0; or k is 1 and 1 is 0; k is 0 and 1 is 1; or both k and 1 are 0; or both k and 1 are 1.

[0320] Exemplary combinations of the sense strand and antisense strand forming an RNAi duplex include the formulas below:

(IIIa)
5′ nₚ-Nₐ-Y Y Y-Nₐ-n_{q} 3′
3′ nₚ-Nₐ-Y′Y′Y′-Nₐ n_{q}′ 5′
(IIIb)
5′ nₚ-Nₐ-Y Y Y-N_{b}-ZZZ-Nₐ-n_{q} 3′
3′ nₚ-Nₐ-Y′Y′Y′-N_{b}-Z′Z′Z′-Nₐ n_{q} 5′
(IIIc)
5′ nₚ-Nₐ-X X X-N_{b}-Y Y Y-Nₐ-n_{q} 3′
3′ nₚ-Nₐ-X′X′X′-N_{b}-Y′Y′Y′-Nₐ-n_{q} 5′
(IIId)
5′ nₚ-Nₐ-X X X-N_{b}-Y Y Y-N_{b}-ZZZ-Nₐ-n_{q} 3′
3′ nₚ-Nₐ-X′X′X′-N_{b}-Y′Y′Y′-N_{b}-Z′Z′Z′-Nₐ-n_{q} 5′

[0321] When the RNAi agent is represented by formula (IIIa), each Nₐ independently represents an oligonucleotide sequence comprising 2-20, 2-15, or 2-10 modified nucleotides.

[0322] When the RNAi agent is represented by formula (IIIb), each N_{b} independently represents an oligonucleotide sequence comprising 1-10, 1-7, 1-5 or 1-4 modified nucleotides. Each Nₐ independently represents an oligonucleotide sequence comprising 2-20, 2-15, or 2-10 modified nucleotides.

[0323] When the RNAi agent is represented as formula (IIIc), each N_{b}, N_{b}′ independently represents an oligonucleotide sequence comprising 0-10, 0-7, 0-10, 0-7, 0-5, 0-4, 0-2 or 0 modified nucleotides. Each Nₐ independently represents an oligonucleotide sequence comprising 2-20, 2-15, or 2-10 modified nucleotides.

[0324] When the RNAi agent is represented as formula (IIId), each N_{b}, N_{b}′ independently represents an oligonucleotide sequence comprising 0-10, 0-7, 0-10, 0-7, 0-5, 0-4, 0-2 or 0 modified nucleotides. Each Nₐ, Nₐ′ independently represents an oligonucleotide sequence comprising 2-20, 2-15, or 2-10 modified nucleotides. Each of Nₐ, Nₐ′, N_{b} and N_{b}′ independently comprises modifications of alternating pattern.

[0325] In one embodiment, when the RNAi agent is represented by formula (IIId), the Nₐ modifications are 2′-O-methyl or 2′-fluoro modifications. In another embodiment, when the RNAi agent is represented by formula (IIId), the Nₐ modifications are 2′-O-methyl or 2′-fluoro modifications and nₚ′>0 and at least one nₚ′ is linked to a neighboring nucleotide a via phosphorothioate linkage. In yet another embodiment, when the RNAi agent is represented by formula (IIId), the Nₐ modifications are 2′-O-methyl or 2′-fluoro modifications, nₚ′>0 and at least one nₚ′ is linked to a neighboring nucleotide via phosphorothioate linkage, and the sense strand is conjugated to one or more C16 (or related) moieties attached through a bivalent or trivalent branched linker (described below). In another embodiment, when the RNAi agent is represented by formula (IIId), the Nₐ modifications are 2′-O-methyl or 2′-fluoro modifications, nₚ′>0 and at least one nₚ′ is linked to a neighboring nucleotide via phosphorothioate linkage, the sense strand comprises at least one phosphorothioate linkage, and the sense strand is conjugated to one or more lipophilic, e.g., C16 (or related) moieties, optionally attached through a linker.

[0326] In one embodiment, when the RNAi agent is represented by formula (IIIa), the Nₐ modifications are 2′-O-methyl or 2′-fluoro modifications, nₚ′>0 and at least one nₚ′ is linked to a neighboring nucleotide via phosphorothioate linkage, the sense strand comprises at least one phosphorothioate linkage, and the sense strand is conjugated to one or more lipophilic, e.g., C16 (or related) moieties attached through a linker.

[0327] In one embodiment, the RNAi agent is a multimer containing at least two duplexes represented by formula (III), (IIIa), (IIIb), (IIIc), and (IIId), wherein the duplexes are connected by a linker. The linker can be cleavable or non-cleavable. Optionally, the multimer further comprises a ligand. Each of the duplexes can target the same gene or two different genes; or each of the duplexes can target same gene at two different target sites.

[0328] In one embodiment, the RNAi agent is a multimer containing three, four, five, six or more duplexes represented by formula (III), (IIIa), (IIIb), (IIIc), and (IIId), wherein the duplexes are connected by a linker. The linker can be cleavable or non-cleavable. Optionally, the multimer further comprises a ligand. Each of the duplexes can target the same gene or two different genes; or each of the duplexes can target same gene at two different target sites.

[0329] In one embodiment, two RNAi agents represented by formula (III), (IIIa), (IIIb), (IIIc), and (IIId) are linked to each other at the 5′ end, and one or both of the 3′ ends and are optionally conjugated to a ligand. Each of the agents can target the same gene or two different genes; or each of the agents can target same gene at two different target sites.

[0330] Various publications describe multimeric RNAi agents that can be used in the methods of the disclosure. Such publications include WO2007/091269, WO2010/141511, WO2007/117686, WO2009/014887, and WO2011/031520; and U.S. Pat. No. 7,858,769, the entire contents of each of which are hereby incorporated herein by reference.

[0331] In certain embodiments, the compositions and methods of the disclosure include a vinyl phosphonate (VP) modification of an RNAi agent as described herein. In exemplary embodiments, a vinyl phosphonate of the disclosure has the following structure:

[chemical structure]

A vinyl phosphonate of the instant disclosure may be attached to either the antisense or the sense strand of a dsRNA of the disclosure. In certain preferred embodiments, a vinyl phosphonate of the instant disclosure is attached to the antisense strand of a dsRNA, optionally at the 5′ end of the antisense strand of the dsRNA.

[0332] In exemplary embodiments, a 5′ vinyl phosphonate modified nucleotide of the disclosure has the structure:

[chemical structure]

[0333] wherein X is O or S;
[0334] R is hydrogen, hydroxy, fluoro, or C₁₋₂₀alkoxy (e.g., methoxy or n-hexadecyloxy);
[0335] R^{5′} is ═C(H)—P(O)(OH)₂ and the double bond between the C5′ carbon and R^{5′} is in the E or Z orientation (e.g., E orientation); and
[0336] B is a nucleobase or a modified nucleobase, optionally where B is adenine, guanine, cytosine, thymine, or uracil.

[0337] In one embodiment, R^{5′} is ═C(H)—P(O)(OH)₂ and the double bond between the C5′ carbon and R5′ is in the E orientation. In another embodiment, R is methoxy and R^{5′} is ═C(H)—P(O)(OH)₂ and the double bond between the C5′ carbon and R5′ is in the E orientation. In another embodiment, X is S, R is methoxy, and R^{5′} is =C(H)—P(O)(OH)₂ and the double bond between the C5′ carbon and R5′ is in the E orientation.

[0338] Vinyl phosphate modifications are also contemplated for the compositions and methods of the instant disclosure. An exemplary vinyl phosphate structure is:

[chemical structure]

[0339] Additional exemplary vinyl phosphate structures include the preceding structure, where R5′ is =C(H)—OP(O)(OH)₂ and the double bond between the C5′ carbon and R5′ is in the E or Z orientation (e.g., E orientation).

### B. Thermally Destabilizing Modifications

[0340] In certain embodiments, a dsRNA molecule can be optimized for RNA interference by incorporating thermally destabilizing modifications in the seed region of the antisense strand (i.e., at positions 2-9 of the 5′-end of the antisense strand) to reduce or inhibit off-target gene silencing. It has been discovered that dsRNAs with an antisense strand comprising at least one thermally destabilizing modification of the duplex within the first 9 nucleotide positions, counting from the 5′ end, of the antisense strand have reduced off-target gene silencing activity. Accordingly, in some embodiments, the antisense strand comprises at least one (e.g., one, two, three, four, five or more) thermally destabilizing modification of the duplex within the first 9 nucleotide positions of the 5′ region of the antisense strand. In some embodiments, one or more thermally destabilizing modification(s) of the duplex is/are located in positions 2-9, or optionally positions 4-8, from the 5′-end of the antisense strand. In some further embodiments, the thermally destabilizing modification(s) of the duplex is/are located at position 6, 7 or 8 from the 5′-end of the antisense strand. In still some further embodiments, the thermally destabilizing modification of the duplex is located at position 7 from the 5′-end of the antisense strand. The term “thermally destabilizing modification(s)” includes modification(s) that would result with a dsRNA with a lower overall melting temperature (Tm) (optionally a Tm with one, two, three or four degrees lower than the Tm of the dsRNA without having such modification(s). In some embodiments, the thermally destabilizing modification of the duplex is located at position 2, 3, 4, 5 or 9 from the 5′-end of the antisense strand.

[0341] The thermally destabilizing modifications can include, but are not limited to, abasic modification; mismatch with the opposing nucleotide in the opposing strand; and sugar modification such as 2′-deoxy modification, acyclic nucleotide, e.g., unlocked nucleic acids (UNA) or glycol nucleic acid (GNA); and 2′-5′-linked ribonucleotides (“3′-RNA”).

[0342] Exemplified abasic modifications include, but are not limited to the following:

[chemical structure]

### Wherein R=H, Me, Et or OMe; R′=H, Me, Et or OMe; R″=H, Me, Et or OMe

[chemical structure]

wherein B is a modified or unmodified nucleobase.

[0343] Exemplified sugar modifications include, but are not limited to the following:

[chemical structure]

wherein B is a modified or unmodified nucleobase.

[0344] In some embodiments the thermally destabilizing modification of the duplex is selected from the group consisting of:

[chemical structure]

wherein B is a modified or unmodified nucleobase and the asterisk on each structure represents either R, S or racemic.

[0345] In some embodiments the thermally destabilizing modification of the duplex is selected from the group consisting of:

[chemical structure]

wherein B is a modified or unmodified nucleobase and the asterisk represents either R, S or racemic (e.g. S).

[0346] The term “acyclic nucleotide” refers to any nucleotide having an acyclic ribose sugar, for example, where any of bonds between the ribose carbons (e.g., C1′-C2′, C2′-C3′, C3′-C4′, C4′-O4′, or C1′-O4′) is absent or at least one of ribose carbons or oxygen (e.g., C1′, C2′, C3′, C4′ or O4′) are independently or in combination absent from the nucleotide. In some embodiments, acyclic nucleotide is

[chemical structure]

wherein B is a modified or unmodified nucleobase, R¹ and R² independently are H, halogen, OR₃, or alkyl; and R₃ is H, alkyl, cycloalkyl, aryl, aralkyl, heteroaryl or sugar). The term “UNA” refers to unlocked acyclic nucleic acid, wherein any of the bonds of the sugar has been removed, forming an unlocked “sugar” residue. In one example, UNA also encompasses monomers with bonds between C1′-C4′ being removed (i.e. the covalent carbon-oxygen-carbon bond between the C1′ and C4′ carbons). In another example, the C2′-C3′ bond (i.e. the covalent carbon-carbon bond between the C2′ and C3′ carbons) of the sugar is removed (see Mikhailov et. al., Tetrahedron Letters, 26 (17): 2059 (1985); and Fluiter et al., Mol. Biosyst., 10: 1039 (2009), which are hereby incorporated by reference in their entirety). The acyclic derivative provides greater backbone flexibility without affecting the Watson-Crick pairings. The acyclic nucleotide can be linked via 2′-5′ or 3′-5′ linkage.

[0347] The term ‘GNA’ refers to glycol nucleic acid which is a polymer similar to DNA or RNA but differing in the composition of its “backbone” in that is composed of repeating glycerol units linked by phosphodiester bonds:

[chemical structure]

[0348] The thermally destabilizing modification of the duplex can be mismatches (i.e., noncomplementary base pairs) between the thermally destabilizing nucleotide and the opposing nucleotide in the opposite strand within the dsRNA duplex. Exemplary mismatch base pairs include G:G, G:A, G:U, G:T, A:A, A:C, C:C, C:U, C:T, U:U, T:T, U:T, or a combination thereof. Other mismatch base pairings known in the art are also amenable to the present disclosure. A mismatch can occur between nucleotides that are either naturally occurring nucleotides or modified nucleotides, i.e., the mismatch base pairing can occur between the nucleobases from respective nucleotides independent of the modifications on the ribose sugars of the nucleotides. In certain embodiments, the dsRNA molecule contains at least one nucleobase in the mismatch pairing that is a 2′-deoxy nucleobase; e.g., the 2′-deoxy nucleobase is in the sense strand.

[0349] In some embodiments, the thermally destabilizing modification of the duplex in the seed region of the antisense strand includes nucleotides with impaired W—C H-bonding to complementary base on the target mRNA, such as:

[chemical structure]

[0350] More examples of abasic nucleotide, acyclic nucleotide modifications (including UNA and GNA), and mismatch modifications have been described in detail in WO 2011/133876, which is herein incorporated by reference in its entirety.

[0351] The thermally destabilizing modifications may also include universal base with reduced or abolished capability to form hydrogen bonds with the opposing bases, and phosphate modifications.

[0352] In some embodiments, the thermally destabilizing modification of the duplex includes nucleotides with non-canonical bases such as, but not limited to, nucleobase modifications with impaired or completely abolished capability to form hydrogen bonds with bases in the opposite strand. These nucleobase modifications have been evaluated for destabilization of the central region of the dsRNA duplex as described in WO 2010/0011895, which is herein incorporated by reference in its entirety. Exemplary nucleobase modifications are:

[chemical structure]

[0353] In some embodiments, the thermally destabilizing modification of the duplex in the seed region of the antisense strand includes one or more α-nucleotide complementary to the base on the target mRNA, such as:

[chemical structure]

wherein R is H, OH, OCH₃, F, NH₂, NHMe, NMe₂ or O-alkyl.

[0354] Exemplary phosphate modifications known to decrease the thermal stability of dsRNA duplexes compared to natural phosphodiester linkages are:

[chemical structure]

[0355] The alkyl for the R group can be a C₁-C₆alkyl. Specific alkyls for the R group include, but are not limited to methyl, ethyl, propyl, isopropyl, butyl, pentyl and hexyl.

[0356] As the skilled artisan will recognize, in view of the functional role of nucleobases is defining specificity of an RNAi agent of the disclosure, while nucleobase modifications can be performed in the various manners as described herein, e.g., to introduce destabilizing modifications into an RNAi agent of the disclosure, e.g., for purpose of enhancing on-target effect relative to off-target effect, the range of modifications available and, in general, present upon RNAi agents of the disclosure tends to be much greater for non-nucleobase modifications, e.g., modifications to sugar groups or phosphate backbones of polyribonucleotides. Such modifications are described in greater detail in other sections of the instant disclosure and are expressly contemplated for RNAi agents of the disclosure, either possessing native nucleobases or modified nucleobases as described above or elsewhere herein.

[0357] In addition to the antisense strand comprising a thermally destabilizing modification, the dsRNA can also comprise one or more stabilizing modifications. For example, the dsRNA can comprise at least two (e.g., two, three, four, five, six, seven, eight, nine, ten or more) stabilizing modifications. Without limitations, the stabilizing modifications all can be present in one strand. In some embodiments, both the sense and the antisense strands comprise at least two stabilizing modifications. The stabilizing modification can occur on any nucleotide of the sense strand or antisense strand. For instance, the stabilizing modification can occur on every nucleotide on the sense strand or antisense strand; each stabilizing modification can occur in an alternating pattern on the sense strand or antisense strand; or the sense strand or antisense strand comprises both stabilizing modification in an alternating pattern. The alternating pattern of the stabilizing modifications on the sense strand may be the same or different from the antisense strand, and the alternating pattern of the stabilizing modifications on the sense strand can have a shift relative to the alternating pattern of the stabilizing modifications on the antisense strand.

[0358] In some embodiments, the antisense strand comprises at least two (e.g., two, three, four, five, six, seven, eight, nine, ten or more) stabilizing modifications. Without limitations, a stabilizing modification in the antisense strand can be present at any positions. In some embodiments, the antisense comprises stabilizing modifications at positions 2, 6, 8, 9, 14, and 16 from the 5′-end. In some other embodiments, the antisense comprises stabilizing modifications at positions 2, 6, 14, and 16 from the 5′-end. In still some other embodiments, the antisense comprises stabilizing modifications at positions 2, 14, and 16 from the 5′-end.

[0359] In some embodiments, the antisense strand comprises at least one stabilizing modification adjacent to the destabilizing modification. For example, the stabilizing modification can be the nucleotide at the 5′-end or the 3′-end of the destabilizing modification, i.e., at position −1 or +1 from the position of the destabilizing modification. In some embodiments, the antisense strand comprises a stabilizing modification at each of the 5′-end and the 3′-end of the destabilizing modification, i.e., positions −1 and +1 from the position of the destabilizing modification.

[0360] In some embodiments, the antisense strand comprises at least two stabilizing modifications at the 3′-end of the destabilizing modification, i.e., at positions +1 and +2 from the position of the destabilizing modification.

[0361] In some embodiments, the sense strand comprises at least two (e.g., two, three, four, five, six, seven, eight, nine, ten or more) stabilizing modifications. Without limitations, a stabilizing modification in the sense strand can be present at any positions. In some embodiments, the sense strand comprises stabilizing modifications at positions 7, 10, and 11 from the 5′-end. In some other embodiments, the sense strand comprises stabilizing modifications at positions 7, 9, 10, and 11 from the 5′-end. In some embodiments, the sense strand comprises stabilizing modifications at positions opposite or complimentary to positions 11, 12, and 15 of the antisense strand, counting from the 5′-end of the antisense strand. In some other embodiments, the sense strand comprises stabilizing modifications at positions opposite or complimentary to positions 11, 12, 13, and 15 of the antisense strand, counting from the 5′-end of the antisense strand. In some embodiments, the sense strand comprises a block of two, three, or four stabilizing modifications.

[0362] In some embodiments, the sense strand does not comprise a stabilizing modification in position opposite or complimentary to the thermally destabilizing modification of the duplex in the antisense strand.

[0363] Exemplary thermally stabilizing modifications include, but are not limited to, 2′-fluoro modifications. Other thermally stabilizing modifications include, but are not limited to, LNA.

[0364] In some embodiments, the dsRNA of the disclosure comprises at least four (e.g., four, five, six, seven, eight, nine, ten, or more) 2′-fluoro nucleotides. Without limitations, the 2′-fluoro nucleotides all can be present in one strand. In some embodiments, both the sense and the antisense strands comprise at least two 2′-fluoro nucleotides. The 2′-fluoro modification can occur on any nucleotide of the sense strand or antisense strand. For instance, the 2′-fluoro modification can occur on every nucleotide on the sense strand or antisense strand; each 2′-fluoro modification can occur in an alternating pattern on the sense strand or antisense strand; or the sense strand or antisense strand comprises both 2′-fluoro modifications in an alternating pattern. The alternating pattern of the 2′-fluoro modifications on the sense strand may be the same or different from the antisense strand, and the alternating pattern of the 2′-fluoro modifications on the sense strand can have a shift relative to the alternating pattern of the 2′-fluoro modifications on the antisense strand.

[0365] In some embodiments, the antisense strand comprises at least two (e.g., two, three, four, five, six, seven, eight, nine, ten, or more) 2′-fluoro nucleotides. Without limitations, a 2′-fluoro modification in the antisense strand can be present at any positions. In some embodiments, the antisense comprises 2′-fluoro nucleotides at positions 2, 6, 8, 9, 14, and 16 from the 5′-end. In some other embodiments, the antisense comprises 2′-fluoro nucleotides at positions 2, 6, 14, and 16 from the 5′-end. In still some other embodiments, the antisense comprises 2′-fluoro nucleotides at positions 2, 14, and 16 from the 5′-end.

[0366] In some embodiments, the antisense strand comprises at least one 2′-fluoro nucleotide adjacent to the destabilizing modification. For example, the 2′-fluoro nucleotide can be the nucleotide at the 5′-end or the 3′-end of the destabilizing modification, i.e., at position −1 or +1 from the position of the destabilizing modification. In some embodiments, the antisense strand comprises a 2′-fluoro nucleotide at each of the 5′-end and the 3′-end of the destabilizing modification, i.e., positions −1 and +1 from the position of the destabilizing modification.

[0367] In some embodiments, the antisense strand comprises at least two 2′-fluoro nucleotides at the 3′-end of the destabilizing modification, i.e., at positions +1 and +2 from the position of the destabilizing modification.

[0368] In some embodiments, the sense strand comprises at least two (e.g., two, three, four, five, six, seven, eight, nine, ten or more) 2′-fluoro nucleotides. Without limitations, a 2′-fluoro modification in the sense strand can be present at any positions. In some embodiments, the antisense comprises 2′-fluoro nucleotides at positions 7, 10, and 11 from the 5′-end. In some other embodiments, the sense strand comprises 2′-fluoro nucleotides at positions 7, 9, 10, and 11 from the 5′-end. In some embodiments, the sense strand comprises 2′-fluoro nucleotides at positions opposite or complimentary to positions 11, 12, and 15 of the antisense strand, counting from the 5′-end of the antisense strand. In some other embodiments, the sense strand comprises 2′-fluoro nucleotides at positions opposite or complimentary to positions 11, 12, 13, and 15 of the antisense strand, counting from the 5′-end of the antisense strand. In some embodiments, the sense strand comprises a block of two, three or four 2′-fluoro nucleotides.

[0369] In some embodiments, the sense strand does not comprise a 2′-fluoro nucleotide in position opposite or complimentary to the thermally destabilizing modification of the duplex in the antisense strand.

[0370] In some embodiments, the dsRNA molecule of the disclosure comprises a 21 nucleotides (nt) sense strand and a 23 nucleotides (nt) antisense, wherein the antisense strand contains at least one thermally destabilizing nucleotide, where the at least one thermally destabilizing nucleotide occurs in the seed region of the antisense strand (i.e., at position 2-9 of the 5′-end of the antisense strand), wherein one end of the dsRNA is blunt, while the other end is comprises a 2 nt overhang, and wherein the dsRNA optionally further has at least one (e.g., one, two, three, four, five, six or all seven) of the following characteristics: (i) the antisense comprises 2, 3, 4, 5 or 6 2′-fluoro modifications; (ii) the antisense comprises 1, 2, 3, 4 or 5 phosphorothioate internucleotide linkages; (iii) the sense strand is conjugated with a ligand; (iv) the sense strand comprises 2, 3, 4 or 5 2′-fluoro modifications; (v) the sense strand comprises 1, 2, 3, 4 or 5 phosphorothioate internucleotide linkages; (vi) the dsRNA comprises at least four 2′-fluoro modifications; and (vii) the dsRNA comprises a blunt end at 5′-end of the antisense strand. Optionally, the 2 nt overhang is at the 3′-end of the antisense.

[0371] In some embodiments, the dsRNA molecule of the disclosure comprises sense and antisense strands, wherein: the sense strand is 25-30 nucleotide residues in length, wherein starting from the 5′ terminal nucleotide (position 1), positions 1 to 23 of said sense strand comprise at least 8 ribonucleotides; antisense strand is 36-66 nucleotide residues in length and, starting from the 3′ terminal nucleotide, at least 8 ribonucleotides in the positions paired with positions 1-23 of sense strand to form a duplex; wherein at least the 3′terminal nucleotide of antisense strand is unpaired with sense strand, and up to 6 consecutive 3′ terminal nucleotides are unpaired with sense strand, thereby forming a 3′ single stranded overhang of 1-6 nucleotides; wherein the 5′ terminus of antisense strand comprises from 10-30 consecutive nucleotides which are unpaired with sense strand, thereby forming a 10-30 nucleotide single stranded 5′ overhang; wherein at least the sense strand 5′ terminal and 3′ terminal nucleotides are base paired with nucleotides of antisense strand when sense and antisense strands are aligned for maximum complementarity, thereby forming a substantially duplexed region between sense and antisense strands; and antisense strand is sufficiently complementary to a target RNA along at least 19 ribonucleotides of antisense strand length to reduce target gene expression when said double stranded nucleic acid is introduced into a mammalian cell; and wherein the antisense strand contains at least one thermally destabilizing nucleotide, where at least one thermally destabilizing nucleotide is in the seed region of the antisense strand (i.e. at position 2-9 of the 5′-end of the antisense strand). For example, the thermally destabilizing nucleotide occurs between positions opposite or complimentary to positions 14-17 of the 5′-end of the sense strand, and wherein the dsRNA optionally further has at least one (e.g., one, two, three, four, five, six or all seven) of the following characteristics: (i) the antisense comprises 2, 3, 4, 5, or 6 2′-fluoro modifications; (ii) the antisense comprises 1, 2, 3, 4, or 5 phosphorothioate internucleotide linkages; (iii) the sense strand is conjugated with a ligand; (iv) the sense strand comprises 2, 3, 4, or 5 2′-fluoro modifications; (v) the sense strand comprises 1, 2, 3, 4, or 5 phosphorothioate internucleotide linkages; and (vi) the dsRNA comprises at least four 2′-fluoro modifications; and (vii) the dsRNA comprises a duplex region of 12-30 nucleotide pairs in length.

[0372] In some embodiments, the dsRNA molecule of the disclosure comprises sense and antisense strands, wherein said dsRNA molecule comprises a sense strand having a length which is at least 25 and at most 29 nucleotides and an antisense strand having a length which is at most 30 nucleotides with the sense strand comprises a modified nucleotide that is susceptible to enzymatic degradation at position 11 from the 5′end, wherein the 3′ end of said sense strand and the 5′ end of said antisense strand form a blunt end and said antisense strand is 1-4 nucleotides longer at its 3′ end than the sense strand, wherein the duplex region which is at least 25 nucleotides in length, and said antisense strand is sufficiently complementary to a target mRNA along at least 19 nt of said antisense strand length to reduce target gene expression when said dsRNA molecule is introduced into a mammalian cell, and wherein dicer cleavage of said dsRNA preferentially results in an siRNA comprising said 3′ end of said antisense strand, thereby reducing expression of the target gene in the mammal, wherein the antisense strand contains at least one thermally destabilizing nucleotide, where the at least one thermally destabilizing nucleotide is in the seed region of the antisense strand (i.e. at position 2-9 of the 5′-end of the antisense strand), and wherein the dsRNA optionally further has at least one (e.g., one, two, three, four, five, six or all seven) of the following characteristics: (i) the antisense comprises 2, 3, 4, 5, or 6 2′-fluoro modifications; (ii) the antisense comprises 1, 2, 3, 4, or 5 phosphorothioate internucleotide linkages; (iii) the sense strand is conjugated with a ligand; (iv) the sense strand comprises 2, 3, 4, or 5 2′-fluoro modifications; (v) the sense strand comprises 1, 2, 3, 4, or 5 phosphorothioate internucleotide linkages; and (vi) the dsRNA comprises at least four 2′-fluoro modifications; and (vii) the dsRNA has a duplex region of 12-29 nucleotide pairs in length.

[0373] In some embodiments, every nucleotide in the sense strand and antisense strand of the dsRNA molecule may be modified. Each nucleotide may be modified with the same or different modification which can include one or more alteration of one or both of the non-linking phosphate oxygens or of one or more of the linking phosphate oxygens; alteration of a constituent of the ribose sugar, e.g., of the 2′ hydroxyl on the ribose sugar; wholesale replacement of the phosphate moiety with “dephospho” linkers; modification or replacement of a naturally occurring base; and replacement or modification of the ribose-phosphate backbone.

[0374] As nucleic acids are polymers of subunits, many of the modifications occur at a position which is repeated within a nucleic acid, e.g., a modification of a base, or a phosphate moiety, or a non-linking O of a phosphate moiety. In some cases, the modification will occur at all of the subject positions in the nucleic acid but in many cases it will not. By way of example, a modification may only occur at a 3′ or 5′ terminal position, may only occur in a terminal region, e.g., at a position on a terminal nucleotide or in the last 2, 3, 4, 5, or 10 nucleotides of a strand. A modification may occur in a double strand region, a single strand region, or in both. A modification may occur only in the double strand region of an RNA or may only occur in a single strand region of an RNA. E.g., a phosphorothioate modification at a non-linking O position may only occur at one or both termini, may only occur in a terminal region, e.g., at a position on a terminal nucleotide or in the last 2, 3, 4, 5, or 10 nucleotides of a strand, or may occur in double strand and single strand regions, particularly at termini. The 5′ end or ends can be phosphorylated.

[0375] It may be possible, e.g., to enhance stability, to include particular bases in overhangs, or to include modified nucleotides or nucleotide surrogates, in single strand overhangs, e.g., in a 5′ or 3′ overhang, or in both. E.g., it can be desirable to include purine nucleotides in overhangs. In some embodiments all or some of the bases in a 3′ or 5′ overhang may be modified, e.g., with a modification described herein. Modifications can include, e.g., the use of modifications at the 2′ position of the ribose sugar with modifications that are known in the art, e.g., the use of deoxyribonucleotides, 2′-deoxy-2′-fluoro (2′-F) or 2′-O-methyl modified instead of the ribosugar of the nucleobase, and modifications in the phosphate group, e.g., phosphorothioate modifications. Overhangs need not be homologous with the target sequence.

[0376] In some embodiments, each residue of the sense strand and antisense strand is independently modified with LNA, HNA, CeNA, 2′-methoxyethyl, 2′-O-methyl, 2′-O-allyl, 2′-C-allyl, 2′-deoxy, or 2′-fluoro. The strands can contain more than one modification. In some embodiments, each residue of the sense strand and antisense strand is independently modified with 2′-O-methyl or 2′-fluoro. It is to be understood that these modifications are in addition to the at least one thermally destabilizing modification of the duplex present in the antisense strand.

[0377] At least two different modifications are typically present on the sense strand and antisense strand. Those two modifications may be the 2′-deoxy, 2′-O-methyl or 2′-fluoro modifications, acyclic nucleotides or others. In some embodiments, the sense strand and antisense strand each comprises two differently modified nucleotides selected from 2′-O-methyl or 2′-deoxy. In some embodiments, each residue of the sense strand and antisense strand is independently modified with 2′-O-methyl nucleotide, 2′-deoxy nucleotide, 2′-deoxy-2′-fluoro nucleotide, 2′-O—N-methylacetamido (2′-O-NMA) nucleotide, a 2′-O-dimethylaminoethoxyethyl (2′-O-DMAEOE) nucleotide, 2′-O-aminopropyl (2′-O-AP) nucleotide, or 2′-ara-F nucleotide. Again, it is to be understood that these modifications are in addition to the at least one thermally destabilizing modification of the duplex present in the antisense strand.

[0378] In some embodiments, the dsRNA molecule of the disclosure comprises modifications of an alternating pattern, particular in the B1, B2, B3, B1′, B2′, B3′, B4′ regions. The term “alternating motif” or “alternative pattern” as used herein refers to a motif having one or more modifications, each modification occurring on alternating nucleotides of one strand. The alternating nucleotide may refer to one per every other nucleotide or one per every three nucleotides, or a similar pattern. For example, if A, B and C each represent one type of modification to the nucleotide, the alternating motif can be “ABABABABABAB . . . ,” “AABBAABBAABB . . . ,” “AABAABAABAAB . . . ,” “AAABAAABAAAB . . . ,” “AAABBBAAABBB . . . ,” or “ABCABCABCABC . . . ,” etc.

The type of modifications contained in the alternating motif may be the same or different. For example, if A, B, C, D each represent one type of modification on the nucleotide, the alternating pattern, i.e., modifications on every other nucleotide, may be the same, but each of the sense strand or antisense strand can be selected from several possibilities of modifications within the alternating motif such as “ABABAB . . . ”, “ACACAC . . . ” “BDBDBD . . . ” or “CDCDCD . . . ,” etc.

[0379] In some embodiments, the dsRNA molecule of the disclosure comprises the modification pattern for the alternating motif on the sense strand relative to the modification pattern for the alternating motif on the antisense strand is shifted. The shift may be such that the modified group of nucleotides of the sense strand corresponds to a differently modified group of nucleotides of the antisense strand and vice versa. For example, the sense strand when paired with the antisense strand in the dsRNA duplex, the alternating motif in the sense strand may start with “ABABAB” from 5′-3′ of the strand and the alternating motif in the antisense strand may start with “BABABA” from 3′-5′ of the strand within the duplex region. As another example, the alternating motif in the sense strand may start with “AABBAABB” from 5′-3′ of the strand and the alternating motif in the antisense strand may start with “BBAABBAA” from 3′-5′ of the strand within the duplex region, so that there is a complete or partial shift of the modification patterns between the sense strand and the antisense strand.

[0380] In one particular example, the alternating motif in the sense strand is “ABABAB” from 5′-3′ of the strand, where each A is an unmodified ribonucleotide and each B is a 2′-Omethyl modified nucleotide.

[0381] In one particular example, the alternating motif in the sense strand is “ABABAB” from 5′-3′ of the strand, where each A is a 2′-deoxy-2′-fluoro modified nucleotide and each B is a 2′-Omethyl modified nucleotide.

[0382] In another particular example, the alternating motif in the antisense strand is “BABABA” from 3′-5′ of the strand, where each A is a 2′-deoxy-2′-fluoro modified nucleotide and each B is a 2′-Omethyl modified nucleotide.

[0383] In one particular example, the alternating motif in the sense strand is “ABABAB” from 5′-3′ of the strand and the alternating motif in the antisense strand is “BABABA” from 3′-5′ of the strand, where each A is an unmodified ribonucleotide and each B is a 2′-Omethyl modified nucleotide.

[0384] In one particular example, the alternating motif in the sense strand is “ABABAB” from 5′-3′ of the strand and the alternating motif in the antisense strand is “BABABA” from 3′-5′ of the strand, where each A is a 2′-deoxy-2′-fluoro modified nucleotide and each B is a 2′-Omethyl modified nucleotide.

[0385] The dsRNA molecule of the disclosure may further comprise at least one phosphorothioate or methylphosphonate internucleotide linkage. The phosphorothioate or methylphosphonate internucleotide linkage modification may occur on any nucleotide of the sense strand or antisense strand or both in any position of the strand. For instance, the internucleotide linkage modification may occur on every nucleotide on the sense strand or antisense strand; each internucleotide linkage modification may occur in an alternating pattern on the sense strand or antisense strand; or the sense strand or antisense strand comprises two or more internucleotide linkage modifications in an alternating pattern. The alternating pattern of the internucleotide linkage modification on the sense strand may be the same or different from the antisense strand, and the alternating pattern of the internucleotide linkage modification on the sense strand may have a shift relative to the alternating pattern of the internucleotide linkage modification on the antisense strand.

[0386] In some embodiments, the dsRNA molecule comprises the phosphorothioate or methylphosphonate internucleotide linkage modification in the overhang region. For example, the overhang region comprises two nucleotides having a phosphorothioate or methylphosphonate internucleotide linkage between the two nucleotides. Internucleotide linkage modifications also may be made to link the overhang nucleotides with the terminal paired nucleotides within duplex region. For example, at least 2, 3, 4, or all the overhang nucleotides may be linked through phosphorothioate or methylphosphonate internucleotide linkage, and optionally, there may be additional phosphorothioate or methylphosphonate internucleotide linkages linking the overhang nucleotide with a paired nucleotide that is next to the overhang nucleotide. For instance, there may be at least two phosphorothioate internucleotide linkages between the terminal three nucleotides, in which two of the three nucleotides are overhang nucleotides, and the third is a paired nucleotide next to the overhang nucleotide. Optionally, these terminal three nucleotides may be at the 3′-end of the antisense strand.

[0387] In some embodiments, the sense strand of the dsRNA molecule comprises 1-10 blocks of two to ten phosphorothioate or methylphosphonate internucleotide linkages separated by 1, 2, 3, 4, 5, 6, 7, 8, 9, 10, 11, 12, 13, 14, 15, or 16 phosphate internucleotide linkages, wherein one of the phosphorothioate or methylphosphonate internucleotide linkages is placed at any position in the oligonucleotide sequence and the said sense strand is paired with an antisense strand comprising any combination of phosphorothioate, methylphosphonate and phosphate internucleotide linkages or an antisense strand comprising either phosphorothioate or methylphosphonate or phosphate linkage.

[0388] In some embodiments, the antisense strand of the dsRNA molecule comprises two blocks of two phosphorothioate or methylphosphonate internucleotide linkages separated by 1, 2, 3, 4, 5, 6, 7, 8, 9, 10, 11, 12, 13, 14, 15, 16, 17, or 18 phosphate internucleotide linkages, wherein one of the phosphorothioate or methylphosphonate internucleotide linkages is placed at any position in the oligonucleotide sequence and the said antisense strand is paired with a sense strand comprising any combination of phosphorothioate, methylphosphonate and phosphate internucleotide linkages or an antisense strand comprising either phosphorothioate or methylphosphonate or phosphate linkage.

[0389] In some embodiments, the antisense strand of the dsRNA molecule comprises two blocks of three phosphorothioate or methylphosphonate internucleotide linkages separated by 1, 2, 3, 4, 5, 6, 7, 8, 9, 10, 11, 12, 13, 14, 15, or 16 phosphate internucleotide linkages, wherein one of the phosphorothioate or methylphosphonate internucleotide linkages is placed at any position in the oligonucleotide sequence and the said antisense strand is paired with a sense strand comprising any combination of phosphorothioate, methylphosphonate and phosphate internucleotide linkages or an antisense strand comprising either phosphorothioate or methylphosphonate or phosphate linkage.

[0390] In some embodiments, the antisense strand of the dsRNA molecule comprises two blocks of four phosphorothioate or methylphosphonate internucleotide linkages separated by 1, 2, 3, 4, 5, 6, 7, 8, 9, 10, 11, 12, 13, or 14 phosphate internucleotide linkages, wherein one of the phosphorothioate or methylphosphonate internucleotide linkages is placed at any position in the oligonucleotide sequence and the said antisense strand is paired with a sense strand comprising any combination of phosphorothioate, methylphosphonate and phosphate internucleotide linkages or an antisense strand comprising either phosphorothioate or methylphosphonate or phosphate linkage.

[0391] In some embodiments, the antisense strand of the dsRNA molecule comprises two blocks of five phosphorothioate or methylphosphonate internucleotide linkages separated by 1, 2, 3, 4, 5, 6, 7, 8, 9, 10, 11, or 12 phosphate internucleotide linkages, wherein one of the phosphorothioate or methylphosphonate internucleotide linkages is placed at any position in the oligonucleotide sequence and the said antisense strand is paired with a sense strand comprising any combination of phosphorothioate, methylphosphonate and phosphate internucleotide linkages or an antisense strand comprising either phosphorothioate or methylphosphonate or phosphate linkage.

[0392] In some embodiments, the antisense strand of the dsRNA molecule comprises two blocks of six phosphorothioate or methylphosphonate internucleotide linkages separated by 1, 2, 3, 4, 5, 6, 7, 8, 9, or 10 phosphate internucleotide linkages, wherein one of the phosphorothioate or methylphosphonate internucleotide linkages is placed at any position in the oligonucleotide sequence and the said antisense strand is paired with a sense strand comprising any combination of phosphorothioate, methylphosphonate and phosphate internucleotide linkages or an antisense strand comprising either phosphorothioate or methylphosphonate or phosphate linkage.

[0393] In some embodiments, the antisense strand of the dsRNA molecule comprises two blocks of seven phosphorothioate or methylphosphonate internucleotide linkages separated by 1, 2, 3, 4, 5, 6, 7, or 8 phosphate internucleotide linkages, wherein one of the phosphorothioate or methylphosphonate internucleotide linkages is placed at any position in the oligonucleotide sequence and the said antisense strand is paired with a sense strand comprising any combination of phosphorothioate, methylphosphonate and phosphate internucleotide linkages or an antisense strand comprising either phosphorothioate or methylphosphonate or phosphate linkage.

[0394] In some embodiments, the antisense strand of the dsRNA molecule comprises two blocks of eight phosphorothioate or methylphosphonate internucleotide linkages separated by 1, 2, 3, 4, 5, or 6 phosphate internucleotide linkages, wherein one of the phosphorothioate or methylphosphonate internucleotide linkages is placed at any position in the oligonucleotide sequence and the said antisense strand is paired with a sense strand comprising any combination of phosphorothioate, methylphosphonate and phosphate internucleotide linkages or an antisense strand comprising either phosphorothioate or methylphosphonate or phosphate linkage.

[0395] In some embodiments, the antisense strand of the dsRNA molecule comprises two blocks of nine phosphorothioate or methylphosphonate internucleotide linkages separated by 1, 2, 3, or 4 phosphate internucleotide linkages, wherein one of the phosphorothioate or methylphosphonate internucleotide linkages is placed at any position in the oligonucleotide sequence and the said antisense strand is paired with a sense strand comprising any combination of phosphorothioate, methylphosphonate and phosphate internucleotide linkages or an antisense strand comprising either phosphorothioate or methylphosphonate or phosphate linkage.

[0396] In some embodiments, the dsRNA molecule of the disclosure further comprises one or more phosphorothioate or methylphosphonate internucleotide linkage modification within 1-10 of the termini position(s) of the sense or antisense strand. For example, at least 2, 3, 4, 5, 6, 7, 8, 9, or 10 nucleotides may be linked through phosphorothioate or methylphosphonate internucleotide linkage at one end or both ends of the sense or antisense strand.

[0397] In some embodiments, the dsRNA molecule of the disclosure further comprises one or more phosphorothioate or methylphosphonate internucleotide linkage modification within 1-10 of the internal region of the duplex of each of the sense or antisense strand. For example, at least 2, 3, 4, 5, 6, 7, 8, 9, or 10 nucleotides may be linked through phosphorothioate methylphosphonate internucleotide linkage at position 8-16 of the duplex region counting from the 5′-end of the sense strand; the dsRNA molecule can optionally further comprise one or more phosphorothioate or methylphosphonate internucleotide linkage modification within 1-10 of the termini position(s).

[0398] In some embodiments, the dsRNA molecule of the disclosure further comprises one to five phosphorothioate or methylphosphonate internucleotide linkage modification(s) within position 1-5 and one to five phosphorothioate or methylphosphonate internucleotide linkage modification(s) within position 18-23 of the sense strand (counting from the 5′-end), and one to five phosphorothioate or methylphosphonate internucleotide linkage modification at positions 1 and 2 and one to five within positions 18-23 of the antisense strand (counting from the 5′-end).

[0399] In some embodiments, the dsRNA molecule of the disclosure further comprises one phosphorothioate internucleotide linkage modification within position 1-5 and one phosphorothioate or methylphosphonate internucleotide linkage modification within position 18-23 of the sense strand (counting from the 5′-end), and one phosphorothioate internucleotide linkage modification at positions 1 and 2 and two phosphorothioate or methylphosphonate internucleotide linkage modifications within positions 18-23 of the antisense strand (counting from the 5′-end).

[0400] In some embodiments, the dsRNA molecule of the disclosure further comprises two phosphorothioate internucleotide linkage modifications within position 1-5 and one phosphorothioate internucleotide linkage modification within position 18-23 of the sense strand (counting from the 5′-end), and one phosphorothioate internucleotide linkage modification at positions 1 and 2 and two phosphorothioate internucleotide linkage modifications within positions 18-23 of the antisense strand (counting from the 5′-end).

[0401] In some embodiments, the dsRNA molecule of the disclosure further comprises two phosphorothioate internucleotide linkage modifications within position 1-5 and two phosphorothioate internucleotide linkage modifications within position 18-23 of the sense strand (counting from the 5′-end), and one phosphorothioate internucleotide linkage modification at positions 1 and 2 and two phosphorothioate internucleotide linkage modifications within positions 18-23 of the antisense strand (counting from the 5′-end).

[0402] In some embodiments, the dsRNA molecule of the disclosure further comprises two phosphorothioate internucleotide linkage modifications within position 1-5 and two phosphorothioate internucleotide linkage modifications within position 18-23 of the sense strand (counting from the 5′-end), and one phosphorothioate internucleotide linkage modification at positions 1 and 2 and one phosphorothioate internucleotide linkage modification within positions 18-23 of the antisense strand (counting from the 5′-end).

[0403] In some embodiments, the dsRNA molecule of the disclosure further comprises one phosphorothioate internucleotide linkage modification within position 1-5 and one phosphorothioate internucleotide linkage modification within position 18-23 of the sense strand (counting from the 5′-end), and two phosphorothioate internucleotide linkage modifications at positions 1 and 2 and two phosphorothioate internucleotide linkage modifications within positions 18-23 of the antisense strand (counting from the 5′-end).

[0404] In some embodiments, the dsRNA molecule of the disclosure further comprises one phosphorothioate internucleotide linkage modification within position 1-5 and one within position 18-23 of the sense strand (counting from the 5′-end), and two phosphorothioate internucleotide linkage modification at positions 1 and 2 and one phosphorothioate internucleotide linkage modification within positions 18-23 of the antisense strand (counting from the 5′-end).

[0405] In some embodiments, the dsRNA molecule of the disclosure further comprises one phosphorothioate internucleotide linkage modification within position 1-5 (counting from the 5′-end) of the sense strand, and two phosphorothioate internucleotide linkage modifications at positions 1 and 2 and one phosphorothioate internucleotide linkage modification within positions 18-23 of the antisense strand (counting from the 5′-end).

[0406] In some embodiments, the dsRNA molecule of the disclosure further comprises two phosphorothioate internucleotide linkage modifications within position 1-5 (counting from the 5′-end) of the sense strand, and one phosphorothioate internucleotide linkage modification at positions 1 and 2 and two phosphorothioate internucleotide linkage modifications within positions 18-23 of the antisense strand (counting from the 5′-end).

[0407] In some embodiments, the dsRNA molecule of the disclosure further comprises two phosphorothioate internucleotide linkage modifications within position 1-5 and one within position 18-23 of the sense strand (counting from the 5′-end), and two phosphorothioate internucleotide linkage modifications at positions 1 and 2 and one phosphorothioate internucleotide linkage modification within positions 18-23 of the antisense strand (counting from the 5′-end).

[0408] In some embodiments, the dsRNA molecule of the disclosure further comprises two phosphorothioate internucleotide linkage modifications within position 1-5 and one phosphorothioate internucleotide linkage modification within position 18-23 of the sense strand (counting from the 5′-end), and two phosphorothioate internucleotide linkage modifications at positions 1 and 2 and two phosphorothioate internucleotide linkage modifications within positions 18-23 of the antisense strand (counting from the 5′-end).

[0409] In some embodiments, the dsRNA molecule of the disclosure further comprises two phosphorothioate internucleotide linkage modifications within position 1-5 and one phosphorothioate internucleotide linkage modification within position 18-23 of the sense strand (counting from the 5′-end), and one phosphorothioate internucleotide linkage modification at positions 1 and 2 and two phosphorothioate internucleotide linkage modifications within positions 18-23 of the antisense strand (counting from the 5′-end).

[0410] In some embodiments, the dsRNA molecule of the disclosure further comprises two phosphorothioate internucleotide linkage modifications at position 1 and 2, and two phosphorothioate internucleotide linkage modifications at position 20 and 21 of the sense strand (counting from the 5′-end), and one phosphorothioate internucleotide linkage modification at positions 1 and one at position 21 of the antisense strand (counting from the 5′-end).

[0411] In some embodiments, the dsRNA molecule of the disclosure further comprises one phosphorothioate internucleotide linkage modification at position 1, and one phosphorothioate internucleotide linkage modification at position 21 of the sense strand (counting from the 5′-end), and two phosphorothioate internucleotide linkage modifications at positions 1 and 2 and two phosphorothioate internucleotide linkage modifications at positions 20 and 21 the antisense strand (counting from the 5′-end).

[0412] In some embodiments, the dsRNA molecule of the disclosure further comprises two phosphorothioate internucleotide linkage modifications at position 1 and 2, and two phosphorothioate internucleotide linkage modifications at position 21 and 22 of the sense strand (counting from the 5′-end), and one phosphorothioate internucleotide linkage modification at positions 1 and one phosphorothioate internucleotide linkage modification at position 21 of the antisense strand (counting from the 5′-end).

[0413] In some embodiments, the dsRNA molecule of the disclosure further comprises one phosphorothioate internucleotide linkage modification at position 1, and one phosphorothioate internucleotide linkage modification at position 21 of the sense strand (counting from the 5′-end), and two phosphorothioate internucleotide linkage modifications at positions 1 and 2 and two phosphorothioate internucleotide linkage modifications at positions 21 and 22 the antisense strand (counting from the 5′-end).

[0414] In some embodiments, the dsRNA molecule of the disclosure further comprises two phosphorothioate internucleotide linkage modifications at position 1 and 2, and two phosphorothioate internucleotide linkage modifications at position 22 and 23 of the sense strand (counting from the 5′-end), and one phosphorothioate internucleotide linkage modification at positions 1 and one phosphorothioate internucleotide linkage modification at position 21 of the antisense strand (counting from the 5′-end).

[0415] In some embodiments, the dsRNA molecule of the disclosure further comprises one phosphorothioate internucleotide linkage modification at position 1, and one phosphorothioate internucleotide linkage modification at position 21 of the sense strand (counting from the 5′-end), and two phosphorothioate internucleotide linkage modifications at positions 1 and 2 and two phosphorothioate internucleotide linkage modifications at positions 23 and 23 the antisense strand (counting from the 5′-end).

[0416] In some embodiments, compound of the disclosure comprises a pattern of backbone chiral centers. In some embodiments, a common pattern of backbone chiral centers comprises at least 5 internucleotidic linkages in the Sp configuration. In some embodiments, a common pattern of backbone chiral centers comprises at least 6 internucleotidic linkages in the Sp configuration. In some embodiments, a common pattern of backbone chiral centers comprises at least 7 internucleotidic linkages in the Sp configuration. In some embodiments, a common pattern of backbone chiral centers comprises at least 8 internucleotidic linkages in the Sp configuration. In some embodiments, a common pattern of backbone chiral centers comprises at least 9 internucleotidic linkages in the Sp configuration. In some embodiments, a common pattern of backbone chiral centers comprises at least 10 internucleotidic linkages in the Sp configuration. In some embodiments, a common pattern of backbone chiral centers comprises at least 11 internucleotidic linkages in the Sp configuration. In some embodiments, a common pattern of backbone chiral centers comprises at least 12 internucleotidic linkages in the Sp configuration. In some embodiments, a common pattern of backbone chiral centers comprises at least 13 internucleotidic linkages in the Sp configuration. In some embodiments, a common pattern of backbone chiral centers comprises at least 14 internucleotidic linkages in the Sp configuration. In some embodiments, a common pattern of backbone chiral centers comprises at least 15 internucleotidic linkages in the Sp configuration. In some embodiments, a common pattern of backbone chiral centers comprises at least 16 internucleotidic linkages in the Sp configuration. In some embodiments, a common pattern of backbone chiral centers comprises at least 17 internucleotidic linkages in the Sp configuration. In some embodiments, a common pattern of backbone chiral centers comprises at least 18 internucleotidic linkages in the Sp configuration. In some embodiments, a common pattern of backbone chiral centers comprises at least 19 internucleotidic linkages in the Sp configuration. In some embodiments, a common pattern of backbone chiral centers comprises no more than 8 internucleotidic linkages in the Rp configuration. In some embodiments, a common pattern of backbone chiral centers comprises no more than 7 internucleotidic linkages in the Rp configuration. In some embodiments, a common pattern of backbone chiral centers comprises no more than 6 internucleotidic linkages in the Rp configuration. In some embodiments, a common pattern of backbone chiral centers comprises no more than 5 internucleotidic linkages in the Rp configuration. In some embodiments, a common pattern of backbone chiral centers comprises no more than 4 internucleotidic linkages in the Rp configuration. In some embodiments, a common pattern of backbone chiral centers comprises no more than 3 internucleotidic linkages in the Rp configuration. In some embodiments, a common pattern of backbone chiral centers comprises no more than 2 internucleotidic linkages in the Rp configuration. In some embodiments, a common pattern of backbone chiral centers comprises no more than 1 internucleotidic linkages in the Rp configuration. In some embodiments, a common pattern of backbone chiral centers comprises no more than 8 internucleotidic linkages which are not chiral (as a non-limiting example, a phosphodiester). In some embodiments, a common pattern of backbone chiral centers comprises no more than 7 internucleotidic linkages which are not chiral. In some embodiments, a common pattern of backbone chiral centers comprises no more than 6 internucleotidic linkages which are not chiral. In some embodiments, a common pattern of backbone chiral centers comprises no more than 5 internucleotidic linkages which are not chiral. In some embodiments, a common pattern of backbone chiral centers comprises no more than 4 internucleotidic linkages which are not chiral. In some embodiments, a common pattern of backbone chiral centers comprises no more than 3 internucleotidic linkages which are not chiral. In some embodiments, a common pattern of backbone chiral centers comprises no more than 2 internucleotidic linkages which are not chiral. In some embodiments, a common pattern of backbone chiral centers comprises no more than 1 internucleotidic linkages which are not chiral. In some embodiments, a common pattern of backbone chiral centers comprises at least 10 internucleotidic linkages in the Sp configuration, and no more than 8 internucleotidic linkages which are not chiral. In some embodiments, a common pattern of backbone chiral centers comprises at least 11 internucleotidic linkages in the Sp configuration, and no more than 7 internucleotidic linkages which are not chiral. In some embodiments, a common pattern of backbone chiral centers comprises at least 12 internucleotidic linkages in the Sp configuration, and no more than 6 internucleotidic linkages which are not chiral. In some embodiments, a common pattern of backbone chiral centers comprises at least 13 internucleotidic linkages in the Sp configuration, and no more than 6 internucleotidic linkages which are not chiral. In some embodiments, a common pattern of backbone chiral centers comprises at least 14 internucleotidic linkages in the Sp configuration, and no more than 5 internucleotidic linkages which are not chiral. In some embodiments, a common pattern of backbone chiral centers comprises at least 15 internucleotidic linkages in the Sp configuration, and no more than 4 internucleotidic linkages which are not chiral. In some embodiments, the internucleotidic linkages in the Sp configuration are optionally contiguous or not contiguous. In some embodiments, the internucleotidic linkages in the Rp configuration are optionally contiguous or not contiguous. In some embodiments, the internucleotidic linkages which are not chiral are optionally contiguous or not contiguous.

[0417] In some embodiments, compound of the disclosure comprises a block is a stereochemistry block. In some embodiments, a block is an Rp block in that each internucleotidic linkage of the block is Rp. In some embodiments, a 5′-block is an Rp block. In some embodiments, a 3′-block is an Rp block. In some embodiments, a block is an Sp block in that each internucleotidic linkage of the block is Sp. In some embodiments, a 5′-block is an Sp block. In some embodiments, a 3′-block is an Sp block. In some embodiments, provided oligonucleotides comprise both Rp and Sp blocks. In some embodiments, provided oligonucleotides comprise one or more Rp but no Sp blocks. In some embodiments, provided oligonucleotides comprise one or more Sp but no Rp blocks. In some embodiments, provided oligonucleotides comprise one or more PO blocks wherein each internucleotidic linkage in a natural phosphate linkage.

[0418] In some embodiments, compound of the disclosure comprises a 5′-block is an Sp block wherein each sugar moiety comprises a 2′-F modification. In some embodiments, a 5′-block is an Sp block wherein each of internucleotidic linkage is a modified internucleotidic linkage and each sugar moiety comprises a 2′-F modification. In some embodiments, a 5′-block is an Sp block wherein each of internucleotidic linkage is a phosphorothioate linkage and each sugar moiety comprises a 2′-F modification. In some embodiments, a 5′-block comprises 4 or more nucleoside units. In some embodiments, a 5′-block comprises 5 or more nucleoside units. In some embodiments, a 5′-block comprises 6 or more nucleoside units. In some embodiments, a 5′-block comprises 7 or more nucleoside units. In some embodiments, a 3′-block is an Sp block wherein each sugar moiety comprises a 2′-F modification. In some embodiments, a 3′-block is an Sp block wherein each of internucleotidic linkage is a modified internucleotidic linkage and each sugar moiety comprises a 2′-F modification. In some embodiments, a 3′-block is an Sp block wherein each of internucleotidic linkage is a phosphorothioate linkage and each sugar moiety comprises a 2′-F modification. In some embodiments, a 3′-block comprises 4 or more nucleoside units. In some embodiments, a 3′-block comprises 5 or more nucleoside units. In some embodiments, a 3′-block comprises 6 or more nucleoside units. In some embodiments, a 3′-block comprises 7 or more nucleoside units.

[0419] In some embodiments, compound of the disclosure comprises a type of nucleoside in a region or an oligonucleotide is followed by a specific type of internucleotidic linkage, e.g., natural phosphate linkage, modified internucleotidic linkage, Rp chiral internucleotidic linkage, Sp chiral internucleotidic linkage, etc. In some embodiments, A is followed by Sp. In some embodiments, A is followed by Rp. In some embodiments, A is followed by natural phosphate linkage (PO). In some embodiments, U is followed by Sp. In some embodiments, U is followed by Rp. In some embodiments, U is followed by natural phosphate linkage (PO). In some embodiments, C is followed by Sp. In some embodiments, C is followed by Rp. In some embodiments, C is followed by natural phosphate linkage (PO). In some embodiments, G is followed by Sp. In some embodiments, G is followed by Rp. In some embodiments, G is followed by natural phosphate linkage (PO). In some embodiments, C and U are followed by Sp. In some embodiments, C and U are followed by Rp. In some embodiments, C and U are followed by natural phosphate linkage (PO). In some embodiments, A and G are followed by Sp. In some embodiments, A and G are followed by Rp.

[0420] In some embodiments, the antisense strand comprises phosphorothioate internucleotide linkages between nucleotide positions 21 and 22, and between nucleotide positions 22 and 23, wherein the antisense strand contains at least one thermally destabilizing modification of the duplex located in the seed region of the antisense strand (i.e., at position 2-9 of the 5′-end of the antisense strand), and wherein the dsRNA optionally further has at least one (e.g., one, two, three, four, five, six, seven or all eight) of the following characteristics: (i) the antisense comprises 2, 3, 4, 5 or 6 2′-fluoro modifications; (ii) the antisense comprises 3, 4 or 5 phosphorothioate internucleotide linkages; (iii) the sense strand is conjugated with a ligand; (iv) the sense strand comprises 2, 3, 4 or 5 2′-fluoro modifications; (v) the sense strand comprises 1, 2, 3, 4 or 5 phosphorothioate internucleotide linkages; (vi) the dsRNA comprises at least four 2′-fluoro modifications; (vii) the dsRNA comprises a duplex region of 12-40 nucleotide pairs in length; and (viii) the dsRNA has a blunt end at 5′-end of the antisense strand.

[0421] In some embodiments, the antisense strand comprises phosphorothioate internucleotide linkages between nucleotide positions 1 and 2, between nucleotide positions 2 and 3, between nucleotide positions 21 and 22, and between nucleotide positions 22 and 23, wherein the antisense strand contains at least one thermally destabilizing modification of the duplex located in the seed region of the antisense strand (i.e., at position 2-9 of the 5′-end of the antisense strand), and wherein the dsRNA optionally further has at least one (e.g., one, two, three, four, five, six, seven or all eight) of the following characteristics: (i) the antisense comprises 2, 3, 4, 5 or 6 2′-fluoro modifications; (ii) the sense strand is conjugated with a ligand and/or lipophilic moiety; (iii) the sense strand comprises 2, 3, 4 or 5 2′-fluoro modifications; (iv) the sense strand comprises 1, 2, 3, 4 or 5 phosphorothioate internucleotide linkages; (v) the dsRNA comprises at least four 2′-fluoro modifications; (vi) the dsRNA comprises a duplex region of 12-40 nucleotide pairs in length; (vii) the dsRNA comprises a duplex region of 12-40 nucleotide pairs in length; and (viii) the dsRNA has a blunt end at 5′-end of the antisense strand.

[0422] In some embodiments, the sense strand comprises phosphorothioate internucleotide linkages between nucleotide positions 1 and 2, and between nucleotide positions 2 and 3, wherein the antisense strand contains at least one thermally destabilizing modification of the duplex located in the seed region of the antisense strand (i.e., at position 2-9 of the 5′-end of the antisense strand), and wherein the dsRNA optionally further has at least one (e.g., one, two, three, four, five, six, seven or all eight) of the following characteristics: (i) the antisense comprises 2, 3, 4, 5 or 6 2′-fluoro modifications; (ii) the antisense comprises 1, 2, 3, 4 or 5 phosphorothioate internucleotide linkages; (iii) the sense strand is conjugated with a ligand and/or lipophilic moiety; (iv) the sense strand comprises 2, 3, 4 or 5 2′-fluoro modifications; (v) the sense strand comprises 3, 4 or 5 phosphorothioate internucleotide linkages; (vi) the dsRNA comprises at least four 2′-fluoro modifications; (vii) the dsRNA comprises a duplex region of 12-40 nucleotide pairs in length; and (viii) the dsRNA has a blunt end at 5′-end of the antisense strand.

[0423] In some embodiments, the sense strand comprises phosphorothioate internucleotide linkages between nucleotide positions 1 and 2, and between nucleotide positions 2 and 3, the antisense strand comprises phosphorothioate internucleotide linkages between nucleotide positions 1 and 2, between nucleotide positions 2 and 3, between nucleotide positions 21 and 22, and between nucleotide positions 22 and 23, wherein the antisense strand contains at least one thermally destabilizing modification of the duplex located in the seed region of the antisense strand (i.e., at position 2-9 of the 5′-end of the antisense strand), and wherein the dsRNA optionally further has at least one (e.g., one, two, three, four, five, six or all seven) of the following characteristics: (i) the antisense comprises 2, 3, 4, 5 or 6 2′-fluoro modifications; (ii) the sense strand is conjugated with a ligand and/or lipophilic moiety; (iii) the sense strand comprises 2, 3, 4 or 5 2′-fluoro modifications; (iv) the sense strand comprises 3, 4 or 5 phosphorothioate internucleotide linkages; (v) the dsRNA comprises at least four 2′-fluoro modifications; (vi) the dsRNA comprises a duplex region of 12-40 nucleotide pairs in length; and (vii) the dsRNA has a blunt end at 5′-end of the antisense strand.

[0424] In some embodiments, the dsRNA molecule of the disclosure comprises mismatch(es) with the target, within the duplex, or combinations thereof. The mismatch can occur in the overhang region or the duplex region. The base pair can be ranked on the basis of their propensity to promote dissociation or melting (e.g., on the free energy of association or dissociation of a particular pairing, the simplest approach is to examine the pairs on an individual pair basis, though next neighbor or similar analysis can also be used). In terms of promoting dissociation: A:U is preferred over G:C; G:U is preferred over G:C; and I:C is preferred over G:C (I=inosine). Mismatches, e.g., non-canonical or other than canonical pairings (as described elsewhere herein) are preferred over canonical (A:T, A:U, G:C) pairings; and pairings which include a universal base are preferred over canonical pairings.

[0425] In some embodiments, the dsRNA molecule of the disclosure comprises at least one of the first 1, 2, 3, 4, or 5 base pairs within the duplex regions from the 5′-end of the antisense strand can be chosen independently from the group of: A:U, G:U, I:C, and mismatched pairs, e.g., non-canonical or other than canonical pairings or pairings which include a universal base, to promote the dissociation of the antisense strand at the 5′-end of the duplex.

[0426] In some embodiments, the nucleotide at the 1 position within the duplex region from the 5′-end in the antisense strand is selected from the group consisting of A, dA, dU, U, and dT. Alternatively, at least one of the first 1, 2 or 3 base pair within the duplex region from the 5′-end of the antisense strand is an AU base pair. For example, the first base pair within the duplex region from the 5′-end of the antisense strand is an AU base pair.

[0427] It was found that introducing 4′-modified or 5′-modified nucleotide to the 3′-end of a phosphodiester (PO), phosphorothioate (PS), or phosphorodithioate (PS2) linkage of a dinucleotide at any position of single stranded or double stranded oligonucleotide can exert steric effect to the internucleotide linkage and, hence, protecting or stabilizing it against nucleases.

[0428] In some embodiments, 5′-modified nucleoside is introduced at the 3′-end of a dinucleotide at any position of single stranded or double stranded siRNA. For instance, a 5′-alkylated nucleoside may be introduced at the 3′-end of a dinucleotide at any position of single stranded or double stranded siRNA. The alkyl group at the 5′ position of the ribose sugar can be racemic or chirally pure R or S isomer. An exemplary 5′-alkylated nucleoside is 5′-methyl nucleoside. The 5′-methyl can be either racemic or chirally pure R or S isomer.

[0429] In some embodiments, 4′-modified nucleoside is introduced at the 3′-end of a dinucleotide at any position of single stranded or double stranded siRNA. For instance, a 4′-alkylated nucleoside may be introduced at the 3′-end of a dinucleotide at any position of single stranded or double stranded siRNA. The alkyl group at the 4′ position of the ribose sugar can be racemic or chirally pure R or S isomer. An exemplary 4′-alkylated nucleoside is 4′-methyl nucleoside. The 4′-methyl can be either racemic or chirally pure R or S isomer. Alternatively, a 4′-O-alkylated nucleoside may be introduced at the 3′-end of a dinucleotide at any position of single stranded or double stranded siRNA. The 4′-O-alkyl of the ribose sugar can be racemic or chirally pure R or S isomer. An exemplary 4′-O-alkylated nucleoside is 4′-O-methyl nucleoside. The 4′-O-methyl can be either racemic or chirally pure R or S isomer.

[0430] In some embodiments, 5′-alkylated nucleoside is introduced at any position on the sense strand or antisense strand of a dsRNA, and such modification maintains or improves potency of the dsRNA. The 5′-alkyl can be either racemic or chirally pure R or S isomer. An exemplary 5′-alkylated nucleoside is 5′-methyl nucleoside. The 5′-methyl can be either racemic or chirally pure R or S isomer.

[0431] In some embodiments, 4′-alkylated nucleoside is introduced at any position on the sense strand or antisense strand of a dsRNA, and such modification maintains or improves potency of the dsRNA. The 4′-alkyl can be either racemic or chirally pure R or S isomer. An exemplary 4′-alkylated nucleoside is 4′-methyl nucleoside. The 4′-methyl can be either racemic or chirally pure R or S isomer.

[0432] In some embodiments, 4′-O-alkylated nucleoside is introduced at any position on the sense strand or antisense strand of a dsRNA, and such modification maintains or improves potency of the dsRNA. The 5′-alkyl can be either racemic or chirally pure R or S isomer. An exemplary 4′-O-alkylated nucleoside is 4′-O-methyl nucleoside. The 4′-O-methyl can be either racemic or chirally pure R or S isomer.

[0433] In some embodiments, the dsRNA molecule of the disclosure can comprise 2′-5′ linkages (with 2′-H, 2′-OH and 2′-OMe and with P═O or P═S). For example, the 2′-5′ linkages modifications can be used to promote nuclease resistance or to inhibit binding of the sense to the antisense strand, or can be used at the 5′ end of the sense strand to avoid sense strand activation by RISC.

[0434] In another embodiment, the dsRNA molecule of the disclosure can comprise L sugars (e.g., L ribose, L-arabinose with 2′-H, 2′-OH and 2′-OMe). For example, these L sugars modifications can be used to promote nuclease resistance or to inhibit binding of the sense to the antisense strand, or can be used at the 5′ end of the sense strand to avoid sense strand activation by RISC.

[0435] Various publications describe multimeric siRNA which can all be used with the dsRNA of the disclosure. Such publications include WO2007/091269, U.S. Pat. No. 7,858,769, WO2010/141511, WO2007/117686, WO2009/014887, and WO2011/031520 which are hereby incorporated by their entirely.

[0436] A ligand and/or lipophilic moiety may be attached to the polynucleotide via a carrier. Exemplary carriers include (i) at least one “backbone attachment point,” optionally two “backbone attachment points” and (ii) at least one “tethering attachment point.” A “backbone attachment point” as used herein refers to a functional group, e.g. a hydroxyl group, or generally, a bond available for, and that is suitable for incorporation of the carrier into the backbone, e.g., the phosphate, or modified phosphate, e.g., sulfur containing, backbone, of a ribonucleic acid. A “tethering attachment point” (TAP) in some embodiments refers to a constituent ring atom of the cyclic carrier, e.g., a carbon atom or a heteroatom (distinct from an atom which provides a backbone attachment point), that connects a selected moiety. The moiety can be, e.g., a liphophilic alkyl group, optionally a C16 lipophilic moiety. Optionally, the selected moiety is connected by an intervening tether to the cyclic carrier. Thus, the cyclic carrier can include a functional group, e.g., an amino group, or generally, provide a bond, that is suitable for incorporation or tethering of another chemical entity, e.g., a ligand and/or lipophilic moiety to the constituent ring.

[0437] The RNAi agents may be conjugated to a ligand and/or lipophilic moiety via a carrier, wherein the carrier can be a cyclic group or an acyclic group. Optionally, the cyclic group is selected from pyrrolidinyl, pyrazolinyl, pyrazolidinyl, imidazolinyl, imidazolidinyl, piperidinyl, piperazinyl, [1,3]dioxolane, oxazolidinyl, isoxazolidinyl, morpholinyl, thiazolidinyl, isothiazolidinyl, quinoxalinyl, pyridazinonyl, tetrahydrofuryl and decalin. Optionally, the acyclic group is selected from serinol backbone and diethanolamine backbone.

[0438] In certain specific embodiments, the RNAi agent for use in the methods of the disclosure is an agent selected from the group of agents listed in Tables 2 or 3. These agents may further comprise a ligand, such as one or more lipophilic moieties.

III. iRNAs Conjugated to Ligands

[0439] Another modification of the RNA of an iRNA of the disclosure involves chemically linking to the iRNA one or more ligands, moieties or conjugates that enhance the activity, cellular distribution or cellular uptake of the iRNA, e.g., into a cell. Such moieties include but are not limited to lipid moieties such as a cholesterol moiety (Letsinger et al., Proc. Natl. Acid. Sci. USA, 1989, 86: 6553-6556), cholic acid(Manoharan et al., Biorg. Med. Chem. Let., 1994, 4: 1053-1060), a thioether, e.g., beryl-S-tritylthiol (Manoharan et al., Ann. N.Y. Acad. Sci., 1992, 660: 306-309; Manoharan et al., Biorg. Med. Chem. Let., 1993, 3: 2765-2770), a thiocholesterol (Oberhauser et al., Nucl. Acids Res., 1992, 20: 533-538), an aliphatic chain, e.g., dodecandiol or undecyl residues (Saison-Behmoaras et al., EMBO J, 1991, 10: 1111-1118; Kabanov et al., FEBS Lett., 1990, 259: 327-330; Svinarchuk et al., Biochimie, 1993, 75: 49-54), a phospholipid, e.g., di-hexadecyl-rac-glycerol or triethyl-ammonium 1,2-di-O-hexadecyl-rac-glycero-3-phosphonate (Manoharan et al., Tetrahedron Lett., 1995, 36: 3651-3654; Shea et al., Nucl. Acids Res., 1990, 18: 3777-3783), a polyamine or a polyethylene glycol chain (Manoharan et al., Nucleosides & Nucleotides, 1995, 14: 969-973), or adamantane acetic acid (Manoharan et al., Tetrahedron Lett., 1995, 36: 3651-3654), a palmityl moiety (Mishra et al., Biochim. Biophys. Acta, 1995, 1264: 229-237), or an octadecylamine or hexylamino-carbonyloxycholesterol moiety (Crooke et al., J. Pharmacol. Exp. Ther., 1996, 277: 923-937).

[0440] In certain embodiments, a ligand alters the distribution, targeting or lifetime of an iRNA agent into which it is incorporated. In some embodiments, a ligand provides an enhanced affinity for a selected target, e.g., molecule, cell or cell type, compartment, e.g., a cellular or organ compartment, tissue, organ or region of the body, as, e.g., compared to a species absent such a ligand. Typical ligands will not take part in duplex pairing in a duplexed nucleic acid.

[0441] Ligands can include a naturally occurring substance, such as a protein (e.g., human serum albumin (HSA), low-density lipoprotein (LDL), or globulin); carbohydrate (e.g., a dextran, pullulan, chitin, chitosan, inulin, cyclodextrin or hyaluronic acid); or a lipid. The ligand may also be a recombinant or synthetic molecule, such as a synthetic polymer, e.g., a synthetic polyamino acid. Examples of polyamino acids include polyamino acid is a polylysine (PLL), poly L-aspartic acid, poly L-glutamic acid, styrene-maleic acid anhydride copolymer, poly(L-lactide-co-glycolied) copolymer, divinyl ether-maleic anhydride copolymer, N-(2-hydroxypropyl)methacrylamide copolymer (HMPA), polyethylene glycol (PEG), polyvinyl alcohol (PVA), polyurethane, poly(2-ethylacryllic acid), N-isopropylacrylamide polymers, or polyphosphazine. Example of polyamines include: polyethylenimine, polylysine (PLL), spermine, spermidine, polyamine, pseudopeptide-polyamine, peptidomimetic polyamine, dendrimer polyamine, arginine, amidine, protamine, cationic lipid, cationic porphyrin, quaternary salt of a polyamine, or an α-helical peptide.

[0442] Ligands can also include targeting groups, e.g., a cell or tissue targeting agent, e.g., a lectin, glycoprotein, lipid or protein, e.g., an antibody, that binds to a specified cell type such as a kidney cell. A targeting group can be a thyrotropin, melanotropin, lectin, glycoprotein, surfactant protein A, mucin carbohydrate, multivalent lactose, multivalent galactose, N-acetyl-galactosamine, N-acetyl-glucosamine multivalent mannose, multivalent fucose, glycosylated polyaminoacids, multivalent galactose, transferrin, bisphosphonate, polyglutamate, polyaspartate, a lipid, cholesterol, a steroid, bile acid, folate, vitamin B12, biotin, or an RGD peptide or RGD peptide mimetic. In certain embodiments, the ligand is a multivalent galactose, e.g., an N-acetyl-galactosamine.

[0443] Other examples of ligands include dyes, intercalating agents (e.g. acridines), cross-linkers (e.g. psoralene, mitomycin C), porphyrins (TPPC4, texaphyrin, Sapphyrin), polycyclic aromatic hydrocarbons (e.g., phenazine, dihydrophenazine), artificial endonucleases (e.g. EDTA), lipophilic molecules, e.g., cholesterol, cholic acid, adamantane acetic acid, 1-pyrene butyric acid, dihydrotestosterone, 1,3-Bis-O(hexadecyl)glycerol, geranyloxyhexyl group, hexadecylglycerol, borneol, menthol, 1,3-propanediol, heptadecyl group, palmitic acid, myristic acid,O3-(oleoyl)lithocholic acid, O3-(oleoyl)cholenic acid, dimethoxytrityl, or phenoxazine) and peptide conjugates (e.g., antennapedia peptide, Tat peptide), alkylating agents, phosphate, amino, mercapto, PEG (e.g., PEG-40K), MPEG, [MPEG]₂, polyamino, alkyl, substituted alkyl, radiolabeled markers, enzymes, haptens (e.g. biotin), transport/absorption facilitators (e.g., aspirin, vitamin E, folic acid), synthetic ribonucleases (e.g., imidazole, bisimidazole, histamine, imidazole clusters, acridine-imidazole conjugates, Eu3+ complexes of tetraazamacrocycles), dinitrophenyl, HRP, or AP.

[0444] Ligands can be proteins, e.g., glycoproteins, or peptides, e.g., molecules having a specific affinity for a co-ligand, or antibodies e.g., an antibody, that binds to a specified cell type such as a cancer cell, endothelial cell, or bone cell. Ligands may also include hormones and hormone receptors. They can also include non-peptidic species, such as lipids, lectins, carbohydrates, vitamins, cofactors, multivalent lactose, multivalent galactose, N-acetyl-galactosamine, N-acetyl-glucosamine multivalent mannose, or multivalent fucose. The ligand can be, for example, a lipopolysaccharide, an activator of p38 MAP kinase, or an activator of NF-κB.

[0445] The ligand can be a substance, e.g., a drug, which can increase the uptake of the iRNA agent into the cell, for example, by disrupting the cell's cytoskeleton, e.g., by disrupting the cell's microtubules, microfilaments, or intermediate filaments. The drug can be, for example, taxon, vincristine, vinblastine, cytochalasin, nocodazole, japlakinolide, latrunculin A, phalloidin, swinholide A, indanocine, or myoservin.

[0446] In some embodiments, a ligand attached to an iRNA as described herein acts as a pharmacokinetic modulator (PK modulator). PK modulators include lipophiles, bile acids, steroids, phospholipid analogues, peptides, protein binding agents, PEG, vitamins etc. Exemplary PK modulators include, but are not limited to, cholesterol, fatty acids, cholic acid, lithocholic acid, dialkylglycerides, diacylglyceride, phospholipids, sphingolipids, naproxen, ibuprofen, vitamin E, biotin etc. Oligonucleotides that comprise a number of phosphorothioate linkages are also known to bind to serum protein, thus short oligonucleotides, e.g., oligonucleotides of about 5 bases, 10 bases, 15 bases or 20 bases, comprising multiple of phosphorothioate linkages in the backbone are also amenable to the present disclosure as ligands (e.g. as PK modulating ligands). In addition, aptamers that bind serum components (e.g. serum proteins) are also suitable for use as PK modulating ligands in the embodiments described herein.

[0447] Ligand-conjugated iRNAs of the disclosure may be synthesized by the use of an oligonucleotide that bears a pendant reactive functionality, such as that derived from the attachment of a linking molecule onto the oligonucleotide (described below). This reactive oligonucleotide may be reacted directly with commercially-available ligands, ligands that are synthesized bearing any of a variety of protecting groups, or ligands that have a linking moiety attached thereto.

[0448] The oligonucleotides used in the conjugates of the present disclosure may be conveniently and routinely made through the well-known technique of solid-phase synthesis. Equipment for such synthesis is sold by several vendors including, for example, Applied Biosystems® (Foster City, Calif.). Any other means for such synthesis known in the art may additionally or alternatively be employed. It is also known to use similar techniques to prepare other oligonucleotides, such as the phosphorothioates and alkylated derivatives.

[0449] In the ligand-conjugated oligonucleotides and ligand-molecule bearing sequence-specific linked nucleosides of the present disclosure, the oligonucleotides and oligonucleosides may be assembled on a suitable DNA synthesizer utilizing standard nucleotide or nucleoside precursors, or nucleotide or nucleoside conjugate precursors that already bear the linking moiety, ligand-nucleotide or nucleoside-conjugate precursors that already bear the ligand molecule, or non-nucleoside ligand-bearing building blocks.

[0450] When using nucleotide-conjugate precursors that already bear a linking moiety, the synthesis of the sequence-specific linked nucleosides is typically completed, and the ligand molecule is then reacted with the linking moiety to form the ligand-conjugated oligonucleotide. In some embodiments, the oligonucleotides or linked nucleosides of the present disclosure are synthesized by an automated synthesizer using phosphoramidites derived from ligand-nucleoside conjugates in addition to the standard phosphoramidites and non-standard phosphoramidites that are commercially available and routinely used in oligonucleotide synthesis.

### A. Lipid Conjugates

[0451] In certain embodiments, the ligand or conjugate is a lipid or lipid-based molecule. Such a lipid or lipid-based molecule can typically bind a serum protein, such as human serum albumin (HSA). An HSA binding ligand allows for distribution of the conjugate to a target tissue, e.g., a non-kidney target tissue of the body. For example, the target tissue can be tissues of the CNS, e.g., brain tissue. Other molecules that can bind HSA can also be used as ligands. For example, naproxen or aspirin can be used. A lipid or lipid-based ligand can (a) increase resistance to degradation of the conjugate, (b) increase targeting or transport into a target cell or cell membrane, or (c) can be used to adjust binding to a serum protein, e.g., HSA.

[0452] A lipid-based ligand can be used to modulate, e.g., control (e.g., inhibit) the binding of the conjugate to a target tissue. For example, a lipid or lipid-based ligand that binds to HSA more strongly will be less likely to be targeted to the kidney and therefore less likely to be cleared from the body. A lipid or lipid-based ligand that binds to HSA less strongly can be used to target the conjugate to the kidney.

[0453] In certain embodiments, the lipid-based ligand binds HSA. For example, the ligand can bind HSA with a sufficient affinity such that distribution of the conjugate to a non-kidney tissue is enhanced. However, the affinity is typically not so strong that the HSA-ligand binding cannot be reversed.

[0454] In certain embodiments, the lipid-based ligand binds HSA weakly or not at all, such that distribution of the conjugate to the kidney is enhanced. Other moieties that target to kidney cells can also be used in place of or in addition to the lipid-based ligand.

[0455] In another aspect, the ligand is a moiety, e.g., a vitamin, which is taken up by a target cell, e.g., a proliferating cell. These are particularly useful for treating disorders characterized by unwanted cell proliferation, e.g., of the malignant or non-malignant type, e.g., cancer cells. Exemplary vitamins include vitamin A, E, and K. Other exemplary vitamins include are B vitamin, e.g., folic acid, B12, riboflavin, biotin, pyridoxal or other vitamins or nutrients taken up by cancer cells. Also included are HSA and low density lipoprotein (LDL).

### B. Cell Permeation Agents

[0456] In another aspect, the ligand is a cell-permeation agent, such as a helical cell-permeation agent. In certain embodiments, the agent is amphipathic. An exemplary agent is a peptide such as tat or antennopedia. If the agent is a peptide, it can be modified, including a peptidylmimetic, invertomers, non-peptide or pseudo-peptide linkages, and use of D-amino acids. The helical agent is typically an α-helical agent and can have a lipophilic and a lipophobic phase.

[0457] The ligand can be a peptide or peptidomimetic. A peptidomimetic (also referred to herein as an oligopeptidomimetic) is a molecule capable of folding into a defined three-dimensional structure similar to a natural peptide. The attachment of peptide and peptidomimetics to iRNA agents can affect pharmacokinetic distribution of the iRNA, such as by enhancing cellular recognition and absorption. The peptide or peptidomimetic moiety can be about 5-50 amino acids long, e.g., about 5, 10, 15, 20, 25, 30, 35, 40, 45, or 50 amino acids long.

[0458] A peptide or peptidomimetic can be, for example, a cell permeation peptide, cationic peptide, amphipathic peptide, or hydrophobic peptide (e.g., consisting primarily of Tyr, Trp, or Phe). The peptide moiety can be a dendrimer peptide, constrained peptide or crosslinked peptide. In another alternative, the peptide moiety can include a hydrophobic membrane translocation sequence (MTS). An exemplary hydrophobic MTS-containing peptide is RFGF having the amino acid sequence AAVALLPAVLLALLAP (SEQ ID NO: 9). An RFGF analogue (e.g., amino acid sequence AALLPVLLAAP (SEQ ID NO: 10)) containing a hydrophobic MTS can also be a targeting moiety. The peptide moiety can be a “delivery” peptide, which can carry large polar molecules including peptides, oligonucleotides, and protein across cell membranes. For example, sequences from the HIV Tat protein (GRKKRRQRRRPPQ (SEQ ID NO: 11)) and the Drosophila Antennapedia protein (RQIKIWFQNRRMKWKK (SEQ ID NO: 12)) have been found to be capable of functioning as delivery peptides. A peptide or peptidomimetic can be encoded by a random sequence of DNA, such as a peptide identified from a phage-display library, or one-bead-one-compound (OBOC) combinatorial library (Lam et al., Nature, 354: 82-84, 1991). Typically, the peptide or peptidomimetic tethered to a dsRNA agent via an incorporated monomer unit is a cell targeting peptide such as an arginine-glycine-aspartic acid (RGD)-peptide, or RGD mimic. A peptide moiety can range in length from about 5 amino acids to about 40 amino acids. The peptide moieties can have a structural modification, such as to increase stability or direct conformational properties. Any of the structural modifications described below can be utilized.

[0459] An RGD peptide for use in the compositions and methods of the disclosure may be linear or cyclic, and may be modified, e.g., glycosylated or methylated, to facilitate targeting to a specific tissue(s). RGD-containing peptides and peptidiomimemtics may include D-amino acids, as well as synthetic RGD mimics. In addition to RGD, one can use other moieties that target the integrin ligand. Preferred conjugates of this ligand target PECAM-1 or VEGF.

[0460] An RGD peptide moiety can be used to target a particular cell type, e.g., a tumor cell, such as an endothelial tumor cell or a breast cancer tumor cell (Zitzmann et al., Cancer Res., 62: 5139-43, 2002). An RGD peptide can facilitate targeting of an dsRNA agent to tumors of a variety of other tissues, including the lung, kidney, spleen, or liver (Aoki et al., Cancer Gene Therapy 8: 783-787, 2001). Typically, the RGD peptide will facilitate targeting of an iRNA agent to the kidney. The RGD peptide can be linear or cyclic, and can be modified, e.g., glycosylated or methylated to facilitate targeting to specific tissues. For example, a glycosylated RGD peptide can deliver an iRNA agent to a tumor cell expressing α_{V}β₃ (Haubner et al., Jour. Nucl. Med., 42: 326-336, 2001).

[0461] A “cell permeation peptide” is capable of permeating a cell, e.g., a microbial cell, such as a bacterial or fungal cell, or a mammalian cell, such as a human cell. A microbial cell-permeating peptide can be, for example, an α-helical linear peptide (e.g., LL-37 or Ceropin P1), a disulfide bond-containing peptide (e.g., α-defensin, β-defensin or bactenecin), or a peptide containing only one or two dominating amino acids (e.g., PR-39 or indolicidin). A cell permeation peptide can also include a nuclear localization signal (NLS). For example, a cell permeation peptide can be a bipartite amphipathic peptide, such as MPG, which is derived from the fusion peptide domain of HIV-1 gp41 and the NLS of SV40 large T antigen (Simeoni et al., Nucl. Acids Res. 31: 2717-2724, 2003).

### C. Linkers

[0462] In some embodiments, the conjugate or ligand described herein can be attached to an iRNA oligonucleotide with various linkers that can be cleavable or non-cleavable.

[0463] The term “linker” or “linking group” means an organic moiety that connects two parts of a compound, e.g., covalently attaches two parts of a compound. Linkers typically comprise a direct bond or an atom such as oxygen or sulfur, a unit such as NR8, C(O), C(O)NH, SO, SO₂, SO₂NH or a chain of atoms, such as, but not limited to, substituted or unsubstituted alkyl, substituted or unsubstituted alkenyl, substituted or unsubstituted alkynyl, arylalkyl, arylalkenyl, arylalkynyl, heteroarylalkyl, heteroarylalkenyl, heteroarylalkynyl, heterocyclylalkyl, heterocyclylalkenyl, heterocyclylalkynyl, aryl, heteroaryl, heterocyclyl, cycloalkyl, cycloalkenyl, alkylarylalkyl, alkylarylalkenyl, alkylarylalkynyl, alkenylarylalkyl, alkenylarylalkenyl, alkenylarylalkynyl, alkynylarylalkyl, alkynylarylalkenyl, alkynylarylalkynyl, alkylheteroarylalkyl, alkylheteroarylalkenyl, alkylheteroarylalkynyl, alkenylheteroarylalkyl, alkenylheteroarylalkenyl, alkenylheteroarylalkynyl, alkynylheteroarylalkyl, alkynylheteroarylalkenyl, alkynylheteroarylalkynyl, alkylheterocyclylalkyl, alkylheterocyclylalkenyl, alkylhererocyclylalkynyl, alkenylheterocyclylalkyl, alkenylheterocyclylalkenyl, alkenylheterocyclylalkynyl, alkynylheterocyclylalkyl, alkynylheterocyclylalkenyl, alkynylheterocyclylalkynyl, alkylaryl, alkenylaryl, alkynylaryl, alkylheteroaryl, alkenylheteroaryl, alkynylhereroaryl, which one or more methylenes can be interrupted or terminated by O, S, S(O), SO₂, N(R8), C(O), substituted or unsubstituted aryl, substituted or unsubstituted heteroaryl, substituted or unsubstituted heterocyclic; where R8 is hydrogen, acyl, aliphatic or substituted aliphatic. In certain embodiments, the linker is of a length of about 1-24 atoms, 2-24, 3-24, 4-24, 5-24, 6-24, 6-18, 7-18, 8-18 atoms, 7-17, 8-17, 6-16, 7-16, or 8-16 atoms.

[0464] A cleavable linking group is one which is sufficiently stable outside the cell, but which upon entry into a target cell is cleaved to release the two parts the linker is holding together. In a preferred embodiment, the cleavable linking group is cleaved at least about 10 times, 20, times, 30 times, 40 times, 50 times, 60 times, 70 times, 80 times, 90 times or more, or at least about 100 times faster in a target cell or under a first reference condition (which can, e.g., be selected to mimic or represent intracellular conditions) than in the blood of a subject, or under a second reference condition (which can, e.g., be selected to mimic or represent conditions found in the blood or serum).

[0465] Cleavable linking groups are susceptible to cleavage agents, e.g., pH, redox potential or the presence of degradative molecules. Generally, cleavage agents are more prevalent or found at higher levels or activities inside cells than in serum or blood. Examples of such degradative agents include: redox agents which are selected for particular substrates or which have no substrate specificity, including, e.g., oxidative or reductive enzymes or reductive agents such as mercaptans, present in cells, that can degrade a redox cleavable linking group by reduction; esterases; endosomes or agents that can create an acidic environment, e.g., those that result in a pH of five or lower; enzymes that can hydrolyze or degrade an acid cleavable linking group by acting as a general acid, peptidases (which can be substrate specific), and phosphatases.

[0466] A cleavable linkage group, such as a disulfide bond can be susceptible to pH. The pH of human serum is 7.4, while the average intracellular pH is slightly lower, ranging from about 7.1-7.3. Endosomes have a more acidic pH, in the range of 5.5-6.0, and lysosomes have an even more acidic pH at around 5.0. Some linkers will have a cleavable linking group that is cleaved at a preferred pH, thereby releasing a cationic lipid from the ligand inside the cell, or into the desired compartment of the cell.

[0467] A linker can include a cleavable linking group that is cleavable by a particular enzyme. The type of cleavable linking group incorporated into a linker can depend on the cell to be targeted.

[0468] In general, the suitability of a candidate cleavable linking group can be evaluated by testing the ability of a degradative agent (or condition) to cleave the candidate linking group. It will also be desirable to also test the candidate cleavable linking group for the ability to resist cleavage in the blood, cerebrospinal fluid (CSF), or when in contact with other non-target tissue. Thus, one can determine the relative susceptibility to cleavage between a first and a second condition, where the first is selected to be indicative of cleavage in a target cell and the second is selected to be indicative of cleavage in other tissues or biological fluids, e.g., blood or serum. The evaluations can be carried out in cell free systems, in cells, in cell culture, in organ or tissue culture, or in whole animals. It can be useful to make initial evaluations in cell-free or culture conditions and to confirm by further evaluations in whole animals. In preferred embodiments, useful candidate compounds are cleaved at least about 2, 4, 10, 20, 30, 40, 50, 60, 70, 80, 90, or about 100 times faster in the cell (or under in vitro conditions selected to mimic intracellular conditions) as compared to CSF, blood or serum (or under in vitro conditions selected to mimic extracellular conditions).

i. Redox Cleavable Linking Groups

[0469] In certain embodiments, a cleavable linking group is a redox cleavable linking group that is cleaved upon reduction or oxidation. An example of reductively cleavable linking group is a disulphide linking group (—S—S—). To determine if a candidate cleavable linking group is a suitable “reductively cleavable linking group,” or for example is suitable for use with a particular iRNA moiety and particular targeting agent one can look to methods described herein. For example, a candidate can be evaluated by incubation with dithiothreitol (DTT), or other reducing agent using reagents know in the art, which mimic the rate of cleavage which would be observed in a cell, e.g., a target cell. The candidates can also be evaluated under conditions which are selected to mimic blood or serum conditions. In one, candidate compounds are cleaved by at most about 10% in the blood. In other embodiments, useful candidate compounds are degraded at least about 2, 4, 10, 20, 30, 40, 50, 60, 70, 80, 90, or about 100 times faster in the cell (or under in vitro conditions selected to mimic intracellular conditions) as compared to blood (or under in vitro conditions selected to mimic extracellular conditions). The rate of cleavage of candidate compounds can be determined using standard enzyme kinetics assays under conditions chosen to mimic intracellular media and compared to conditions chosen to mimic extracellular media.

ii. Phosphate-Based Cleavable Linking Groups

[0470] In certain embodiments, a cleavable linker comprises a phosphate-based cleavable linking group. A phosphate-based cleavable linking group is cleaved by agents that degrade or hydrolyze the phosphate group. An example of an agent that cleaves phosphate groups in cells are enzymes such as phosphatases in cells. Examples of phosphate-based linking groups are —O—P(O)(ORk)-O—, —O—P(S)(ORk)-O—, —O—P(S)(SRk)-O—, —S—P(O)(ORk)-O—, —O—P(O)(ORk)-S—, —S—P(O)(ORk)-S—, —O—P(S)(ORk)-S—, —S—P(S)(ORk)-O—, —O—P(O)(Rk)-O—, —O—P(S)(Rk)-O—, —S—P(O)(Rk)-O—, —S—P(S)(Rk)-O—, —S—P(O)(Rk)-S—, —O—P(S)(Rk)-S. Preferred embodiments are —O—P(O)(OH)—O—, —O—P(S)(OH)—O—, —O—P(S)(SH)—O—, —S—P(O)(OH)—O—, —O—P(O)(OH)—S—, —S—P(O)(OH)—S—, —O—P(S)(OH)—S—, —S—P(S)(OH)—O—, —O—P(O)(H)—O—, —O—P(S)(H)—O—, —S—P(O)(H)—O, —S—P(S)(H)—O—, —S—P(O)(H)—S—, —O—P(S)(H)—S—. A preferred embodiment is —O—P(O)(OH)—O—. These candidates can be evaluated using methods analogous to those described above.

iii. Acid Cleavable Linking Groups

[0471] In certain embodiments, a cleavable linker comprises an acid cleavable linking group. An acid cleavable linking group is a linking group that is cleaved under acidic conditions. In preferred embodiments acid cleavable linking groups are cleaved in an acidic environment with a pH of about 6.5 or lower (e.g., about 6.0, 5.75, 5.5, 5.25, 5.0, or lower), or by agents such as enzymes that can act as a general acid. In a cell, specific low pH organelles, such as endosomes and lysosomes can provide a cleaving environment for acid cleavable linking groups. Examples of acid cleavable linking groups include but are not limited to hydrazones, esters, and esters of amino acids. Acid cleavable groups can have the general formula —C═NN—, C(O)O, or —OC(O). A preferred embodiment is when the carbon attached to the oxygen of the ester (the alkoxy group) is an aryl group, substituted alkyl group, or tertiary alkyl group such as dimethyl pentyl or t-butyl. These candidates can be evaluated using methods analogous to those described above.

iv. Ester-Based Cleavable Linking Groups

[0472] In certain embodiments, a cleavable linker comprises an ester-based cleavable linking group. An ester-based cleavable linking group is cleaved by enzymes such as esterases and amidases in cells. Examples of ester-based cleavable linking groups include but are not limited to esters of alkylene, alkenylene and alkynylene groups. Ester cleavable linking groups have the general formula —C(O)O—, or —OC(O)—. These candidates can be evaluated using methods analogous to those described above.

v. Peptide-Based Cleavable Linking Groups

[0473] In yet another embodiment, a cleavable linker comprises a peptide-based cleavable linking group. A peptide-based cleavable linking group is cleaved by enzymes such as peptidases and proteases in cells. Peptide-based cleavable linking groups are peptide bonds formed between amino acids to yield oligopeptides (e.g., dipeptides, tripeptides etc.) and polypeptides. Peptide-based cleavable groups do not include the amide group (—C(O)NH—). The amide group can be formed between any alkylene, alkenylene or alkynelene. A peptide bond is a special type of amide bond formed between amino acids to yield peptides and proteins. The peptide-based cleavage group is generally limited to the peptide bond (i.e., the amide bond) formed between amino acids yielding peptides and proteins and does not include the entire amide functional group. Peptide-based cleavable linking groups have the general formula —NHCHR_{A}C(O)NHCHR_{B}C(O)—, where R_{A} and R_{B} are the R groups of the two adjacent amino acids. These candidates can be evaluated using methods analogous to those described above.

[0474] “Chimeric” iRNA compounds or “chimeras,” in the context of this disclosure, are iRNA compounds, optionally dsRNA agents, that contain two or more chemically distinct regions, each made up of at least one monomer unit, i.e., a nucleotide in the case of a dsRNA compound. These iRNAs typically contain at least one region wherein the RNA is modified so as to confer upon the iRNA increased resistance to nuclease degradation, increased cellular uptake, or increased binding affinity for the target nucleic acid. An additional region of the iRNA can serve as a substrate for enzymes capable of cleaving RNA: DNA or RNA: RNA hybrids. By way of example, RNase H is a cellular endonuclease which cleaves the RNA strand of an RNA: DNA duplex. Activation of RNase H, therefore, results in cleavage of the RNA target, thereby greatly enhancing the efficiency of iRNA inhibition of gene expression. Consequently, comparable results can often be obtained with shorter iRNAs when chimeric dsRNAs are used, compared to phosphorothioate deoxy dsRNAs hybridizing to the same target region. Cleavage of the RNA target can be routinely detected by gel electrophoresis and, if necessary, associated nucleic acid hybridization techniques known in the art.

[0475] In certain instances, the RNA of an iRNA can be modified by a non-ligand group. A number of non-ligand molecules have been conjugated to iRNAs in order to enhance the activity, cellular distribution or cellular uptake of the iRNA, and procedures for performing such conjugations are available in the scientific literature. Such non-ligand moieties have included lipid moieties, such as cholesterol (Kubo, T. et al., Biochem. Biophys. Res. Comm., 2007, 365(1): 54-61; Letsinger et al., Proc. Natl. Acad. Sci. USA, 1989, 86: 6553), cholic acid (Manoharan et al., Bioorg. Med. Chem. Lett., 1994, 4: 1053), a thioether, e.g., hexyl-S-tritylthiol (Manoharan et al., Ann. N.Y. Acad. Sci., 1992, 660: 306; Manoharan et al., Bioorg. Med. Chem. Let., 1993, 3: 2765), a thiocholesterol (Oberhauser et al., Nucl. Acids Res., 1992, 20: 533), an aliphatic chain, e.g., dodecandiol or undecyl residues (Saison-Behmoaras et al., EMBO J., 1991, 10: 111; Kabanov et al., FEBS Lett., 1990, 259: 327; Svinarchuk et al., Biochimie, 1993, 75: 49), a phospholipid, e.g., di-hexadecyl-rac-glycerol or triethylammonium 1,2-di-O-hexadecyl-rac-glycero-3-H-phosphonate (Manoharan et al., Tetrahedron Lett., 1995, 36: 3651; Shea et al., Nucl. Acids Res., 1990, 18: 3777), a polyamine or a polyethylene glycol chain (Manoharan et al., Nucleosides & Nucleotides, 1995, 14: 969), or adamantane acetic acid (Manoharan et al., Tetrahedron Lett., 1995, 36: 3651), a palmityl moiety (Mishra et al., Biochim. Biophys. Acta, 1995, 1264: 229), or an octadecylamine or hexylamino-carbonyl-oxycholesterol moiety (Crooke et al., J. Pharmacol. Exp. Ther., 1996, 277: 923). Representative United States patents that teach the preparation of such RNA conjugates have been listed above. Typical conjugation protocols involve the synthesis of RNAs bearing an aminolinker at one or more positions of the sequence. The amino group is then reacted with the molecule being conjugated using appropriate coupling or activating reagents. The conjugation reaction can be performed either with the RNA still bound to the solid support or following cleavage of the RNA, in solution phase. Purification of the RNA conjugate by HPLC typically affords the pure conjugate.

### IV. In Vivo Testing of SNCA Knockdown

[0476] A wide variety of α-synuclein PD animal models are available (Gómez-Benito et al. Front Pharmacol. 11: 356). A number of rodent models of PD rely upon intracerebral or systemic administration of either α-synuclein pre-formed fibrils (PFFs) or brain extracts containing Lewy bodies and α-synuclein derived from PD patients or transgenic mice exhibiting α-synuclein pathology. More relevant to assessment of SNCA RNAi agents, genetic models of PD have also been made. Recombinant adeno-associated virus vectors (rAAV) overexpressing the SNCA gene have been used to model PD: overexpression of wild type α-synuclein or PD-associated mutants (A53T or A30P α-synuclein) utilizing rAAV has been described as leading to a progressive loss of dopaminergic neurons in the substantia nigra pars compacta (SNc), a loss of dopamine terminals in the striatum (Koprich et al. Mol Neurodegener. 5: 43; Koprich et al. PLoS One. 6: e17698; Oliveras-Salvá et al. Mol Neurodegener. 8: 44; Bourdenx et al. Acta Neuropathol Commun. 3: 46; Caudal et al. Exp Neurol. 273: 243-52; Lu et al. Biochem Biophys Res Commun. 464: 988-993; Ip et al. Biochem Biophys Res Commun. 464: 988-993), and a reduction of striatal dopamine content (Koprich et al. PLoS One. 6: e17698; Ip et al.). However, the extent of neurodegeneration achieved with the rAAV model has been variable among the different studies. Several serotypes, promoters, α-synuclein species, doses, and time-course after injection have been tested, and all these factors influence the parkinsonian phenotype achieved.

[0477] Several transgenic mice lines expressing E46K α-synuclein have also been generated (Emmer et al. J Biol Chem. 286: 35104-18; Nuber et al. Neuron. 100: 75-90.e5), while E46K human α-synuclein has been overexpressed using viral vectors in mice. In the rAAV-α-synuclein model, the presence of pα-synuclein inclusions in the nigrostriatal system is concomitant with a significant loss of nigral dopaminergic neurons and the reduction in tyrosine hydroxylase immunoreactivity in the striatum. Overexpression of wild type or A53T human α-synuclein induces a progressive loss of dopaminergic neurons in the SN over time (Oliveras-Salvá et al. Mol Neurodegener. 8: 44).

[0478] Some studies have shown that rAAV-α-synuclein expression causes the development of motor alterations, such as an increased apomorphine or amphetamine-induced rotation, defects in the stepping test or increased forepaw asymmetry in the cylinder test (Kirik et al. J Neurosci. 22: 2780-91; Decressac et al. Brain. 134(Pt 8): 2302-11; Koprich et al. PLoS One. 6: e17698; Decressac et al. Neurobiol Dis. 45: 939-53; Gaugler et al. Acta Neuropathol. 123: 653-69; Gombash et al. PLoS One. 8: e81426; Oliveras-Salvá et al. Mol Neurodegener. 8: 44; Bourdenx et al. Acta Neuropathol Commun. 3: 46; Caudal et al. Exp Neurol. 273: 243-52; Ip et al. Biochem Biophys Res Commun. 464: 988-993). These motor deficits appear several weeks after injection in animals with a significant loss of dopaminergic neurons.

[0479] Such models have been used to develop and evaluate potential therapies aimed at reducing the aggregation of α-synuclein and preventing against neurodegeneration induced by α-synuclein (Decressac et al. Proc Natl Acad Sci USA. 110: E1817-26; Xilouri et al. Autophagy. 9: 2166-8; Rocha et al. Neurobiol Dis. 82: 495-503), and can further be used to demonstrate the in vivo efficacy of the RNAi agents provided herein. Such models may contain constitutive or inducible expression, e.g., overexpression, of, for example, human or rat SNCA, in some instances comprising a pathogenic mutation. Examples of overexpression models used herein include AAV induced expression of the full-length Homo sapiens SNCA transcript Hs00240906_m1 and 3′ UTR, and AAV induced expression of the full-length Rattus norvegicus SNCA transcript NM_019169.2 and 3′ UTR.

### V. Delivery of an RNAi Agent of the Disclosure

[0480] The delivery of an RNAi agent of the disclosure to a cell e.g., a cell within a subject, such as a human subject (e.g., a subject in need thereof, such as a subject having a SNCA-associated disorder, e.g., PD, multiple system atrophy, Lewy body dementia (LBD), etc., can be achieved in a number of different ways. For example, delivery may be performed by contacting a cell with an RNAi agent of the disclosure either in vitro or in vivo. In vivo delivery may also be performed directly by administering a composition comprising an RNAi agent, e.g., a dsRNA, to a subject. Alternatively, in vivo delivery may be performed indirectly by administering one or more vectors that encode and direct the expression of the RNAi agent. These alternatives are discussed further below.

[0481] In general, any method of delivering a nucleic acid molecule (in vitro or in vivo) can be adapted for use with an RNAi agent of the disclosure (see e.g., Akhtar S. and Julian RL., (1992) Trends Cell. Biol. 2(5): 139-144 and WO94/02595, which are incorporated herein by reference in their entireties). For in vivo delivery, factors to consider for delivering an RNAi agent include, for example, biological stability of the delivered agent, prevention of non-specific effects, and accumulation of the delivered agent in the target tissue. The non-specific effects of an RNAi agent can be minimized by local administration, for example, by direct injection or implantation into a tissue or topically administering the preparation. Local administration to a treatment site maximizes local concentration of the agent, limits the exposure of the agent to systemic tissues that can otherwise be harmed by the agent or that can degrade the agent, and permits a lower total dose of the RNAi agent to be administered. Several studies have shown successful knockdown of gene products when an RNAi agent is administered locally. For example, intraocular delivery of a VEGF dsRNA by intravitreal injection in cynomolgus monkeys (Tolentino, M J. et al., (2004) Retina 24: 132-138) and subretinal injections in mice (Reich, S J. et al. (2003) Mol. Vis. 9: 210-216) were both shown to prevent neovascularization in an experimental model of age-related macular degeneration. In addition, direct intratumoral injection of a dsRNA in mice reduces tumor volume (Pille, J. et al. (2005) Mol. Ther. 11: 267-274) and can prolong survival of tumor-bearing mice (Kim, W J. et al., (2006) Mol. Ther. 14: 343-350; Li, S. et al., (2007) Mol. Ther. 15: 515-523). RNA interference has also shown success with local delivery to the CNS by direct injection (Dorn, G. et al., (2004) Nucleic Acids 32: e49; Tan, P H. et al. (2005) Gene Ther. 12: 59-66; Makimura, H. et al. (2002) BMC Neurosci. 3: 18; Shishkina, G T., et al. (2004) Neuroscience 129: 521-528; Thakker, E R., et al. (2004) Proc. Natl. Acad. Sci. U.S.A. 101: 17270-17275; Akaneya, Y., et al. (2005) J. Neurophysiol. 93: 594-602) and to the lungs by intranasal administration (Howard, K A. et al., (2006) Mol. Ther. 14: 476-484; Zhang, X. et al., (2004) J. Biol. Chem. 279: 10677-10684; Bitko, V. et al., (2005) Nat. Med. 11: 50-55). For administering an RNAi agent systemically and/or intrathecally for the treatment of a disease, the RNA can be modified or alternatively delivered using a drug delivery system; both methods act to prevent the rapid degradation of the dsRNA by endo- and exo-nucleases in vivo. Modification of the RNA or the pharmaceutical carrier can also permit targeting of the RNAi agent to the target tissue and avoid undesirable off-target effects (e.g., without wishing to be bound by theory, use of GNAs as described herein has been identified to destabilize the seed region of a dsRNA, resulting in enhanced preference of such dsRNAs for on-target effectiveness, relative to off-target effects, as such off-target effects are significantly weakened by such seed region destabilization). RNAi agents can be modified by chemical conjugation to lipophilic groups such as cholesterol to enhance cellular uptake and prevent degradation. For example, an RNAi agent directed against ApoB conjugated to a lipophilic cholesterol moiety was injected systemically into mice and resulted in knockdown of apoB mRNA in both the liver and jejunum (Soutschek, J. et al., (2004) Nature 432: 173-178). Conjugation of an RNAi agent to an aptamer has been shown to inhibit tumor growth and mediate tumor regression in a mouse model of prostate cancer (McNamara, J O. et al., (2006) Nat. Biotechnol. 24: 1005-1015). In an alternative embodiment, the RNAi agent can be delivered using drug delivery systems such as a nanoparticle, a dendrimer, a polymer, liposomes, or a cationic delivery system. Positively charged cationic delivery systems facilitate binding of molecule RNAi agent (negatively charged) and also enhance interactions at the negatively charged cell membrane to permit efficient uptake of an RNAi agent by the cell. Cationic lipids, dendrimers, or polymers can either be bound to an RNAi agent, or induced to form a vesicle or micelle (see e.g., Kim SH. et al., (2008) Journal of Controlled Release 129(2): 107-116) that encases an RNAi agent. The formation of vesicles or micelles further prevents degradation of the RNAi agent when administered systemically. Methods for making and administering cationic-RNAi agent complexes are well within the abilities of one skilled in the art (see e.g., Sorensen, D R., et al. (2003) J. Mol. Biol 327: 761-766; Verma, U N. et al., (2003) Clin. Cancer Res. 9: 1291-1300; Arnold, A S et al. (2007) J. Hypertens. 25: 197-205, which are incorporated herein by reference in their entirety). Some non-limiting examples of drug delivery systems useful for systemic delivery of RNAi agents include DOTAP (Sorensen, D R., et al (2003), supra; Verma, U N. et al., (2003), supra), Oligofectamine, “solid nucleic acid lipid particles” (Zimmermann, T S. et al., (2006) Nature 441: 111-114), cardiolipin (Chien, P Y. et al., (2005) Cancer Gene Ther. 12: 321-328; Pal, A. et al., (2005) Int J. Oncol. 26: 1087-1091), polyethyleneimine (Bonnet ME. et al., (2008) Pharm. Res. August 16 Epub ahead of print; Aigner, A. (2006) J. Biomed. Biotechnol. 71659), Arg-Gly-Asp (RGD) peptides (Liu, S. (2006) Mol. Pharm. 3: 472-487), and polyamidoamines (Tomalia, D A. et al., (2007) Biochem. Soc. Trans. 35: 61-67; Yoo, H. et al., (1999) Pharm. Res. 16: 1799-1804). In some embodiments, an RNAi agent forms a complex with cyclodextrin for systemic administration. Methods for administration and pharmaceutical compositions of RNAi agents and cyclodextrins can be found in U.S. Pat. No. 7,427,605, which is herein incorporated by reference in its entirety.

[0482] Certain aspects of the instant disclosure relate to a method of reducing the expression of a SNCA target gene in a cell, comprising contacting said cell with the double-stranded RNAi agent of the disclosure. In one embodiment, the cell is a CNS cell.

[0483] Another aspect of the disclosure relates to a method of reducing the expression of a SNCA target gene in a subject, comprising administering to the subject the double-stranded RNAi agent of the disclosure.

[0484] Another aspect of the disclosure relates to a method of treating a subject having a SNCA-associated disorder, comprising administering to the subject a therapeutically effective amount of the double-stranded RNAi agent of the disclosure, thereby treating the subject. Exemplary CNS disorders that can be treated by the method of the disclosure include synucleinopathies, such as PD, multiple system atrophy, Lewy body dementia (LBD), pure autonomic failure (PAF), Pick's disease, progressive supranuclear palsy, dementia pugilistica, parkinsonism linked to chromosome 17, Lytico-Bodig disease, tangle predominant dementia, Argyrophilic grain disease, ganglioglioma, gangliocytoma, meningioangiomatosis, subacute sclerosing panencephalitis, lead encephalopathy, tuberous sclerosis, Hallervorden-Spatz disease, lipofuscinosis, corticobasal degeneration, frontotemporal dementia, frontotemporal lobar degeneration, Alzheimer's disease, Huntington's disease, Down's syndrome, psychosis, schizophrenia and Creutzfeldt-Jakob disease.

[0485] In one embodiment, the double-stranded RNAi agent is administered intrathecally. By intrathecal administration of the double-stranded RNAi agent, the method can reduce the expression of a SNCA target gene in a brain (e.g., striatum) or spine tissue, for instance, cortex, cerebellum, cervical spine, lumbar spine, and thoracic spine.

[0486] For ease of exposition the formulations, compositions and methods in this section are discussed largely with regard to modified siRNA compounds. It may be understood, however, that these formulations, compositions and methods can be practiced with other siRNA compounds, e.g., unmodified siRNA compounds, and such practice is within the disclosure. A composition that includes an RNAi agent can be delivered to a subject by a variety of routes. Exemplary routes include: intrathecal, intravenous, topical, rectal, anal, vaginal, nasal, pulmonary, and ocular.

[0487] The RNAi agents of the disclosure can be incorporated into pharmaceutical compositions suitable for administration. Such compositions typically include one or more species of RNAi agent and a pharmaceutically acceptable carrier. As used herein the language “pharmaceutically acceptable carrier” is intended to include any and all solvents, dispersion media, coatings, antibacterial and antifungal agents, isotonic and absorption delaying agents, and the like, compatible with pharmaceutical administration. The use of such media and agents for pharmaceutically active substances is well known in the art. Except insofar as any conventional media or agent is incompatible with the active compound, use thereof in the compositions is contemplated. Supplementary active compounds can also be incorporated into the compositions.

[0488] The pharmaceutical compositions of the present disclosure may be administered in a number of ways depending upon whether local or systemic treatment is desired and upon the area to be treated. Administration may be topical (including ophthalmic, vaginal, rectal, intranasal, transdermal), oral, or parenteral. Parenteral administration includes intravenous drip, subcutaneous, intraperitoneal or intramuscular injection, or intrathecal or intraventricular administration.

[0489] The route and site of administration may be chosen to enhance targeting. For example, to target brain and other CNS cells, intrathecal injection would be a logical choice.

[0490] Formulations for topical administration may include transdermal patches, ointments, lotions, creams, gels, drops, suppositories, sprays, liquids, and powders. Conventional pharmaceutical carriers, aqueous, powder or oily bases, thickeners and the like may be necessary or desirable. Coated condoms, gloves and the like may also be useful.

[0491] Compositions for oral administration include powders or granules, suspensions or solutions in water, syrups, elixirs or non-aqueous media, tablets, capsules, lozenges, or troches. In the case of tablets, carriers that can be used include lactose, sodium citrate and salts of phosphoric acid. Various disintegrants such as starch, and lubricating agents such as magnesium stearate, sodium lauryl sulfate and talc, are commonly used in tablets. For oral administration in capsule form, useful diluents are lactose and high molecular weight polyethylene glycols. When aqueous suspensions are required for oral use, the nucleic acid compositions can be combined with emulsifying and suspending agents. If desired, certain sweetening or flavoring agents can be added.

[0492] Compositions for intrathecal or intraventricular administration may include sterile aqueous solutions which may also contain buffers, diluents, and other suitable additives.

[0493] Formulations for parenteral administration may include sterile aqueous solutions which may also contain buffers, diluents, and other suitable additives. Intrathecal injection may be facilitated by an intrathecal catheter, for example, attached to a reservoir. For intrathecal use, the total concentration of solutes may be controlled to render the preparation isotonic.

[0494] In one embodiment, the administration of the siRNA compound, e.g., a double-stranded siRNA compound, or ssiRNA compound, composition is parenteral, e.g., intrathecal, intravenous (e.g., as a bolus or as a diffusible infusion), intradermal, intraperitoneal, intramuscular, intraventricular, intracranial, subcutaneous, transmucosal, buccal, sublingual, endoscopic, rectal, oral, vaginal, topical, pulmonary, intranasal, urethral, or ocular. Administration can be provided by the subject or by another person, e.g., a health care provider. The medication can be provided in measured doses or in a dispenser which delivers a metered dose. Selected modes of delivery are discussed in more detail below.

### Intrathecal Administration

[0495] In certain embodiments, the double-stranded RNAi agent is delivered by intrathecal injection (i.e., injection into the spinal fluid which bathes the brain and spinal cord tissue). Intrathecal injection of RNAi agents into the spinal fluid can be performed as a bolus injection or via minipumps which can be implanted beneath the skin, providing a regular and constant delivery of siRNA into the spinal fluid. The circulation of the spinal fluid from the choroid plexus, where it is produced, down around the spinal cord and dorsal root ganglia and subsequently up past the cerebellum and over the cortex to the arachnoid granulations, where the fluid can exit the CNS, that, depending upon size, stability, and solubility of the compounds injected, molecules delivered intrathecally could hit targets throughout the entire CNS.

[0496] In some embodiments, the intrathecal administration is via a pump. The pump may be a surgically implanted osmotic pump. In one embodiment, the osmotic pump is implanted into the subarachnoid space of the spinal canal to facilitate intrathecal administration.

[0497] In some embodiments, the intrathecal administration is via an intrathecal delivery system for a pharmaceutical including a reservoir containing a volume of the pharmaceutical agent, and a pump configured to deliver a portion of the pharmaceutical agent contained in the reservoir. More details about this intrathecal delivery system may be found in WO 2015/116658, which is incorporated by reference in its entirety.

[0498] The amount of intrathecally injected RNAi agents may vary from one target gene to another target gene and the appropriate amount that has to be applied may have to be determined individually for each target gene. Typically, this amount ranges from 10 g to 2 mg, optionally 50 g to 1500 kg, more optionally 100 g to 1000 g.

### Vector-Encoded RNAi Agents of the Disclosure

[0499] RNAi agents targeting the SNCA gene can be expressed from transcription units inserted into DNA or RNA vectors (see, e.g., Couture, A, et al., TIG. (1996), 12: 5-10; WO 00/22113, WO 00/22114, and U.S. Pat. No. 6,054,299). Expression is optionally sustained (months or longer), depending upon the specific construct used and the target tissue or cell type. These transgenes can be introduced as a linear construct, a circular plasmid, or a viral vector, which can be an integrating or non-integrating vector. The transgene can also be constructed to permit it to be inherited as an extrachromosomal plasmid (Gassmann, et al., (1995) Proc. Natl. Acad. Sci. USA 92: 1292).

[0500] The individual strand or strands of an RNAi agent can be transcribed from a promoter on an expression vector. Where two separate strands are to be expressed to generate, for example, a dsRNA, two separate expression vectors can be co-introduced (e.g., by transfection or infection) into a target cell. Alternatively, each individual strand of a dsRNA can be transcribed by promoters both of which are located on the same expression plasmid. In one embodiment, a dsRNA is expressed as inverted repeat polynucleotides joined by a linker polynucleotide sequence such that the dsRNA has a stem and loop structure.

[0501] RNAi agent expression vectors are generally DNA plasmids or viral vectors. Expression vectors compatible with eukaryotic cells, optionally those compatible with vertebrate cells, can be used to produce recombinant constructs for the expression of an RNAi agent as described herein. Delivery of RNAi agent expressing vectors can be to the CNS, such as by intrathecal administration, systemic, such as by intravenous or intramuscular administration, by administration to target cells ex-planted from the patient followed by reintroduction into the patient, or by any other means that allows for introduction into a desired target cell.

[0502] Viral vector systems which can be utilized with the methods and compositions described herein include, but are not limited to, (a) adenovirus vectors; (b) retrovirus vectors, including but not limited to lentiviral vectors, moloney murine leukemia virus, etc.; (c) adeno-associated virus (AAV) vectors; (d) herpes simplex virus vectors; (e) SV 40 vectors; (f) polyoma virus vectors; (g) papilloma virus vectors; (h) picornavirus vectors; (i) pox virus vectors such as an orthopox, e.g., vaccinia virus vectors or avipox, e.g. canary pox or fowl pox; and (j) a helper-dependent or gutless adenovirus. Replication-defective viruses can also be advantageous. Different vectors will or will not become incorporated into the cells' genome. The constructs can include viral sequences for transfection, if desired. Alternatively, the construct can be incorporated into vectors capable of episomal replication, e.g. EPV and EBV vectors. Constructs for the recombinant expression of an RNAi agent will generally require regulatory elements, e.g., promoters, enhancers, etc., to ensure the expression of the RNAi agent in target cells. Other aspects to consider for vectors and constructs are known in the art.

### VI. Pharmaceutical Compositions of the Invention

[0503] The present disclosure also includes pharmaceutical compositions and formulations which include the RNAi agents of the disclosure. In one embodiment, provided herein are pharmaceutical compositions containing an RNAi agent, as described herein, and a pharmaceutically acceptable carrier. The pharmaceutical compositions containing the RNAi agent are useful for treating a disease or disorder associated with the expression or activity of SNCA, e.g., a SNCA-associated neurodegenerative disease, such as a synucleinopathy, such as PD, multiple system atrophy (MSA), Lewy body dementia (LBD), pure autonomic failure (PAF), Pick's disease, progressive supranuclear palsy, dementia pugilistica, parkinsonism linked to chromosome 17, Lytico-Bodig disease, tangle predominant dementia, Argyrophilic grain disease, ganglioglioma, gangliocytoma, meningioangiomatosis, subacute sclerosing panencephalitis, lead encephalopathy, tuberous sclerosis, Hallervorden-Spatz disease, lipofuscinosis, corticobasal degeneration, frontotemporal dementia, frontotemporal lobar degeneration, Alzheimer's disease, Huntington's disease, Down's syndrome, psychosis, schizophrenia and Creutzfeldt-Jakob disease.

[0504] Such pharmaceutical compositions are formulated based on the mode of delivery. One example is compositions that are formulated for direct delivery into the CNS, e.g., by intrathecal or intravitreal routes of injection, optionally by infusion into the brain (e.g., striatum), such as by continuous pump infusion.

[0505] In some embodiments, the pharmaceutical compositions of the disclosure are pyrogen free or non-pyrogenic.

[0506] The pharmaceutical compositions of the disclosure may be administered in dosages sufficient to inhibit expression of a SNCA gene. In general, a suitable dose of an RNAi agent of the disclosure will be in the range of about 0.001 to about 200.0 milligrams per kilogram body weight of the recipient per day, generally in the range of about 1 to 50 mg per kilogram body weight per day.

[0507] A repeat-dose regimen may include administration of a therapeutic amount of an RNAi agent on a regular basis, such as monthly to once every six months. In certain embodiments, the RNAi agent is administered about once per quarter (i.e., about once every three months) to about twice per year.

[0508] After an initial treatment regimen (e.g., loading dose), the treatments can be administered on a less frequent basis.

[0509] In other embodiments, a single dose of the pharmaceutical compositions can be long lasting, such that subsequent doses are administered at not more than 1, 2, 3, or 4 or more month intervals. In some embodiments of the disclosure, a single dose of the pharmaceutical compositions of the disclosure is administered once per month. In other embodiments of the disclosure, a single dose of the pharmaceutical compositions of the disclosure is administered once per quarter to twice per year.

[0510] The skilled artisan will appreciate that certain factors can influence the dosage and timing required to effectively treat a subject, including but not limited to the severity of the disease or disorder, previous treatments, the general health or age of the subject, and other diseases present. Moreover, treatment of a subject with a therapeutically effective amount of a composition can include a single treatment or a series of treatments.

[0511] Advances in mouse genetics have generated mouse models for the study of SNCA-associated diseases that would benefit from reduction in the expression of SNCA. Such models can be used for in vivo testing of RNAi agents, as well as for determining a therapeutically effective dose. Suitable mouse models are known in the art and include, for example, the mouse models described elsewhere herein.

[0512] The pharmaceutical compositions of the present disclosure can be administered in a number of ways depending upon whether local or systemic treatment is desired and upon the area to be treated. In certain embodiments, administration is intrathecal. However, in certain embodiments, administration can be topical (e.g., by a transdermal patch), pulmonary, e.g., by inhalation or insufflation of powders or aerosols, including by nebulizer; intratracheal, intranasal, epidermal and transdermal, oral or parenteral. Parenteral administration includes intravenous, intraarterial, subcutaneous, intraperitoneal or intramuscular injection or infusion; subdermal, e.g., via an implanted device; or intracranial, e.g., by intraparenchymal, intrathecal or intraventricular, administration.

[0513] The RNAi agents can be delivered in a manner to target a particular tissue, such as the CNS (e.g., neuronal, glial or vascular tissue of the brain).

[0514] Pharmaceutical compositions and formulations for topical administration can include transdermal patches, ointments, lotions, creams, gels, drops, suppositories, sprays, liquids and powders. Conventional pharmaceutical carriers, aqueous, powder or oily bases, thickeners and the like can be necessary or desirable. Coated condoms, gloves and the like can also be useful. Suitable topical formulations include those in which the RNAi agents featured in the disclosure are in admixture with a topical delivery agent such as lipids, liposomes, fatty acids, fatty acid esters, steroids, chelating agents and surfactants. Suitable lipids and liposomes include neutral (e.g., dioleoylphosphatidyl DOPE ethanolamine, dimyristoylphosphatidyl choline DMPC, distearolyphosphatidyl choline) negative (e.g., dimyristoylphosphatidyl glycerol DMPG) and cationic (e.g., dioleoyltetramethylaminopropyl DOTAP and dioleoylphosphatidyl ethanolamine DOTMA). RNAi agents featured in the disclosure can be encapsulated within liposomes or can form complexes thereto, in particular to cationic liposomes. Alternatively, RNAi agents can be complexed to lipids, in particular to cationic lipids. Suitable fatty acids and esters include but are not limited to arachidonic acid, oleic acid, eicosanoic acid, lauric acid, caprylic acid, capric acid, myristic acid, palmitic acid, stearic acid, linoleic acid, linolenic acid, dicaprate, tricaprate, monoolein, dilaurin, glyceryl 1-monocaprate, 1-dodecylazacycloheptan-2-one, an acylcarnitine, an acylcholine, or a C₁₋₂₀ alkyl ester (e.g., isopropylmyristate IPM), monoglyceride, diglyceride or pharmaceutically acceptable salt thereof. Topical formulations are described in detail in U.S. Pat. No. 6,747,014, which is incorporated herein by reference.

### A. RNAi Agent Formulations Comprising Membranous Molecular Assemblies

[0515] An RNAi agent for use in the compositions and methods of the disclosure can be formulated for delivery in a membranous molecular assembly, e.g., a liposome or a micelle. As used herein, the term “liposome” refers to a vesicle composed of amphiphilic lipids arranged in at least one bilayer, e.g., one bilayer or a plurality of bilayers. Liposomes include unilamellar and multilamellar vesicles that have a membrane formed from a lipophilic material and an aqueous interior. The aqueous portion contains the RNAi agent composition. The lipophilic material isolates the aqueous interior from an aqueous exterior, which typically does not include the RNAi agent composition, although in some examples, it may. Liposomes are useful for the transfer and delivery of active ingredients to the site of action. Because the liposomal membrane is structurally similar to biological membranes, when liposomes are applied to a tissue, the liposomal bilayer fuses with bilayer of the cellular membranes. As the merging of the liposome and cell progresses, the internal aqueous contents that include the RNAi agent are delivered into the cell where the RNAi agent can specifically bind to a target RNA and can mediate RNAi. In some cases, the liposomes are also specifically targeted, e.g., to direct the RNAi agent to particular cell types.

[0516] A liposome containing an RNAi agent can be prepared by a variety of methods. In one example, the lipid component of a liposome is dissolved in a detergent so that micelles are formed with the lipid component. For example, the lipid component can be an amphipathic cationic lipid or lipid conjugate. The detergent can have a high critical micelle concentration and may be nonionic. Exemplary detergents include cholate, CHAPS, octylglucoside, deoxycholate, and lauroyl sarcosine. The RNAi agent preparation is then added to the micelles that include the lipid component. The cationic groups on the lipid interact with the RNAi agent and condense around the RNAi agent to form a liposome. After condensation, the detergent is removed, e.g., by dialysis, to yield a liposomal preparation of RNAi agent.

[0517] If necessary, a carrier compound that assists in condensation can be added during the condensation reaction, e.g., by controlled addition. For example, the carrier compound can be a polymer other than a nucleic acid (e.g., spermine or spermidine). pH can also be adjusted to favor condensation.

[0518] Methods for producing stable polynucleotide delivery vehicles, which incorporate a polynucleotide/cationic lipid complex as structural components of the delivery vehicle, are further described in, e.g., WO 96/37194, the entire contents of which are incorporated herein by reference. Liposome formation can also include one or more aspects of exemplary methods described in Felgner, P. L. et al., (1987) Proc. Natl. Acad. Sci. USA 8: 7413-7417; U.S. Pat. Nos. 4,897,355; 5,171,678; Bangham et al., (1965) M. Mol. Biol. 23: 238; Olson et al., (1979) Biochim. Biophys. Acta 557: 9; Szoka et al., (1978) Proc. Natl. Acad. Sci. 75: 4194; Mayhew et al., (1984) Biochim. Biophys. Acta 775: 169; Kim et al., (1983) Biochim. Biophys. Acta 728: 339; and Fukunaga et al., (1984) Endocrinol. 115: 757. Commonly used techniques for preparing lipid aggregates of appropriate size for use as delivery vehicles include sonication and freeze-thaw plus extrusion (see, e.g., Mayer et al., (1986) Biochim. Biophys. Acta 858: 161. Microfluidization can be used when consistently small (50 to 200 nm) and relatively uniform aggregates are desired (Mayhew et al., (1984) Biochim. Biophys. Acta 775: 169. These methods are readily adapted to packaging RNAi agent preparations into liposomes.

[0519] Liposomes fall into two broad classes. Cationic liposomes are positively charged liposomes which interact with the negatively charged nucleic acid molecules to form a stable complex. The positively charged nucleic acid/liposome complex binds to the negatively charged cell surface and is internalized in an endosome. Due to the acidic pH within the endosome, the liposomes are ruptured, releasing their contents into the cell cytoplasm (Wang et al. (1987) Biochem. Biophys. Res. Commun., 147: 980-985).

[0520] Liposomes, which are pH-sensitive or negatively charged, entrap nucleic acids rather than complex with them. Since both the nucleic acid and the lipid are similarly charged, repulsion rather than complex formation occurs. Nevertheless, some nucleic acid is entrapped within the aqueous interior of these liposomes. pH sensitive liposomes have been used to deliver nucleic acids encoding the thymidine kinase gene to cell monolayers in culture. Expression of the exogenous gene was detected in the target cells (Zhou et al. (1992) Journal of Controlled Release, 19: 269-274).

[0521] One major type of liposomal composition includes phospholipids other than naturally-derived phosphatidylcholine. Neutral liposome compositions, for example, can be formed from dimyristoyl phosphatidylcholine (DMPC) or dipalmitoyl phosphatidylcholine (DPPC). Anionic liposome compositions generally are formed from dimyristoyl phosphatidylglycerol, while anionic fusogenic liposomes are formed primarily from dioleoyl phosphatidylethanolamine (DOPE). Another type of liposomal composition is formed from phosphatidylcholine (PC) such as, for example, soybean PC, and egg PC. Another type is formed from mixtures of phospholipid or phosphatidylcholine or cholesterol.

[0522] Examples of other methods to introduce liposomes into cells in vitro and in vivo include U.S. Pat. Nos. 5,283,185; 5,171,678; WO 94/00569; WO 93/24640; WO 91/16024; Felgner, (1994) J. Biol. Chem. 269: 2550; Nabel, (1993) Proc. Natl. Acad. Sci. 90: 11307; Nabel, (1992) Human Gene Ther. 3: 649; Gershon, (1993) Biochem. 32: 7143; and Strauss, (1992) EMBO J. 11: 417.

[0523] Non-ionic liposomal systems have also been examined to determine their utility in the delivery of drugs to the skin, in particular systems comprising non-ionic surfactant and cholesterol. Non-ionic liposomal formulations comprising Novasome™ I (glyceryl dilaurate/cholesterol/polyoxyethylene-10-stearyl ether) and Novasome™ II (glyceryl distearate/cholesterol/polyoxyethylene-10-stearyl ether) were used to deliver cyclosporin-A into the dermis of mouse skin. Results indicated that such non-ionic liposomal systems were effective in facilitating the deposition of cyclosporine A into different layers of the skin (Hu et al., (1994) S.T.P.Pharma. Sci., 4(6): 466).

[0524] Liposomes also include “sterically stabilized” liposomes, a term which, as used herein, refers to liposomes comprising one or more specialized lipids that, when incorporated into liposomes, result in enhanced circulation lifetimes relative to liposomes lacking such specialized lipids. Examples of sterically stabilized liposomes are those in which part of the vesicle-forming lipid portion of the liposome (A) comprises one or more glycolipids, such as monosialoganglioside G_{M1}, or (B) is derivatized with one or more hydrophilic polymers, such as a polyethylene glycol (PEG) moiety. While not wishing to be bound by any particular theory, it is thought in the art that, at least for sterically stabilized liposomes containing gangliosides, sphingomyelin, or PEG-derivatized lipids, the enhanced circulation half-life of these sterically stabilized liposomes derives from a reduced uptake into cells of the reticuloendothelial system (RES) (Allen et al., (1987) FEBS Letters, 223: 42; Wu et al., (1993) Cancer Research, 53: 3765).

[0525] Various liposomes comprising one or more glycolipids are known in the art. Papahadjopoulos et al. (Ann. N.Y. Acad. Sci., (1987), 507: 64) reported the ability of monosialoganglioside G_{M1}, galactocerebroside sulfate and phosphatidylinositol to improve blood half-lives of liposomes. These findings were expounded upon by Gabizon et al. (Proc. Natl. Acad. Sci. U.S.A., (1988), 85: 6949). U.S. Pat. No. 4,837,028 and WO 88/04924, both to Allen et al., disclose liposomes comprising (1) sphingomyelin and (2) the ganglioside G_{M1} or a galactocerebroside sulfate ester. U.S. Pat. No. 5,543,152 (Webb et al.) discloses liposomes comprising sphingomyelin. Liposomes comprising 1,2-sn-dimyristoylphosphatidylcholine are disclosed in WO 97/13499 (Lim et al).

[0526] In one embodiment, cationic liposomes are used. Cationic liposomes possess the advantage of being able to fuse to the cell membrane. Non-cationic liposomes, although not able to fuse as efficiently with the plasma membrane, are taken up by macrophages in vivo and can be used to deliver RNAi agents to macrophages.

[0527] Further advantages of liposomes include: liposomes obtained from natural phospholipids are biocompatible and biodegradable; liposomes can incorporate a wide range of water and lipid soluble drugs; liposomes can protect encapsulated RNAi agents in their internal compartments from metabolism and degradation (Rosoff, in “Pharmaceutical Dosage Forms,” Lieberman, Rieger and Banker (Eds.), 1988, volume 1, p. 245). Important considerations in the preparation of liposome formulations are the lipid surface charge, vesicle size and the aqueous volume of the liposomes.

[0528] A positively charged synthetic cationic lipid, N-[1-(2,3-dioleyloxy)propyl]-N,N,N-trimethylammonium chloride (DOTMA) can be used to form small liposomes that interact spontaneously with nucleic acid to form lipid-nucleic acid complexes which are capable of fusing with the negatively charged lipids of the cell membranes of tissue culture cells, resulting in delivery of RNAi agent (see, e.g., Felgner, P. L. et al., (1987) Proc. Natl. Acad. Sci. USA 8: 7413-7417, and U.S. Pat. No. 4,897,355 for a description of DOTMA and its use with DNA).

[0529] A DOTMA analogue, 1,2-bis(oleoyloxy)-3-(trimethylammonia)propane (DOTAP) can be used in combination with a phospholipid to form DNA-complexing vesicles. Lipofectin™ Bethesda Research Laboratories, Gaithersburg, Md.) is an effective agent for the delivery of highly anionic nucleic acids into living tissue culture cells that comprise positively charged DOTMA liposomes which interact spontaneously with negatively charged polynucleotides to form complexes. When enough positively charged liposomes are used, the net charge on the resulting complexes is also positive. Positively charged complexes prepared in this way spontaneously attach to negatively charged cell surfaces, fuse with the plasma membrane, and efficiently deliver functional nucleic acids into, for example, tissue culture cells. Another commercially available cationic lipid, 1,2-bis(oleoyloxy)-3,3-(trimethylammonia)propane (“DOTAP”) (Boehringer Mannheim, Indianapolis, Indiana) differs from DOTMA in that the oleoyl moieties are linked by ester, rather than ether linkages.

[0530] Other reported cationic lipid compounds include those that have been conjugated to a variety of moieties including, for example, carboxyspermine which has been conjugated to one of two types of lipids and includes compounds such as 5-carboxyspermylglycine dioctaoleoylamide (“DOGS”) (Transfectam™, Promega, Madison, Wisconsin) and dipalmitoylphosphatidylethanolamine 5-carboxyspermyl-amide (“DPPES”) (see, e.g., U.S. Pat. No. 5,171,678).

[0531] Another cationic lipid conjugate includes derivatization of the lipid with cholesterol (“DC-Chol”) which has been formulated into liposomes in combination with DOPE (See, Gao, X. and Huang, L., (1991) Biochim. Biophys. Res. Commun. 179: 280). Lipopolylysine, made by conjugating polylysine to DOPE, has been reported to be effective for transfection in the presence of serum (Zhou, X. et al., (1991) Biochim. Biophys. Acta 1065: 8). For certain cell lines, these liposomes containing conjugated cationic lipids, are said to exhibit lower toxicity and provide more efficient transfection than the DOTMA-containing compositions. Other commercially available cationic lipid products include DMRIE and DMRIE-HP (Vical, La Jolla, California) and Lipofectamine (DOSPA) (Life Technology, Inc., Gaithersburg, Maryland). Other cationic lipids suitable for the delivery of oligonucleotides are described in WO 98/39359 and WO 96/37194.

[0532] Liposomal formulations are particularly suited for topical administration, liposomes present several advantages over other formulations. Such advantages include reduced side effects related to high systemic absorption of the administered drug, increased accumulation of the administered drug at the desired target, and the ability to administer RNAi agent into the skin. In some implementations, liposomes are used for delivering RNAi agent to epidermal cells and also to enhance the penetration of RNAi agent into dermal tissues, e.g., into skin. For example, the liposomes can be applied topically. Topical delivery of drugs formulated as liposomes to the skin has been documented (see, e.g., Weiner et al., (1992) Journal of Drug Targeting, vol. 2, 405-410 and du Plessis et al., (1992) Antiviral Research, 18: 259-265; Mannino, R. J. and Fould-Fogerite, S., (1998) Biotechniques 6: 682-690; Itani, T. et al., (1987) Gene 56: 267-276; Nicolau, C. et al. (1987) Meth. Enzymol. 149: 157-176; Straubinger, R. M. and Papahadjopoulos, D. (1983) Meth. Enzymol. 101: 512-527; Wang, C. Y. and Huang, L., (1987) Proc. Natl. Acad. Sci. USA 84: 7851-7855).

[0533] Non-ionic liposomal systems have also been examined to determine their utility in the delivery of drugs to the skin, in particular systems comprising non-ionic surfactant and cholesterol. Non-ionic liposomal formulations comprising Novasome I (glyceryl dilaurate/cholesterol/polyoxyethylene-10-stearyl ether) and Novasome II (glyceryl distearate/cholesterol/polyoxyethylene-10-stearyl ether) were used to deliver a drug into the dermis of mouse skin. Such formulations with RNAi agent are useful for treating a dermatological disorder.

[0534] Liposomes that include RNAi agents can be made highly deformable. Such deformability can enable the liposomes to penetrate through pore that are smaller than the average radius of the liposome. For example, transfersomes (highly deformable lipid aggregates which are attractive candidates for drug delivery vehicles) are a type of deformable liposomes. Transfersomes can be described as lipid droplets which are so highly deformable that they are easily able to penetrate through pores which are smaller than the droplet. Transfersomes are adaptable to the environment in which they are used, e.g., they are self-optimizing (adaptive to the shape of pores in the skin), self-repairing, frequently reach their targets without fragmenting, and often self-loading. Transferosomes can be made by adding surface edge activators, usually surfactants, to a standard liposomal composition. Transfersomes have been used to deliver serum albumin to the skin. The transfersome-mediated delivery of serum albumin has been shown to be as effective as subcutaneous injection of a solution containing serum albumin. Transfersomes that include RNAi agent can be delivered, for example, subcutaneously by infection in order to deliver RNAi agent to keratinocytes in the skin. In order to cross intact mammalian skin, lipid vesicles must pass through a series of fine pores, each with a diameter less than 50 nm, under the influence of a suitable transdermal gradient. In addition, due to the lipid properties, these transferosomes can be self-optimizing (adaptive to the shape of pores, e.g., in the skin), self-repairing, and can frequently reach their targets without fragmenting, and often self-loading.

[0535] Other formulations amenable to the present disclosure are described in U.S. provisional application Ser. No. 61/018,616, filed Jan. 2, 2008; 61/018,611, filed Jan. 2, 2008; 61/039,748, filed Mar. 26, 2008; 61/047,087, filed Apr. 22, 2008 and 61/051,528, filed May 8, 2008. PCT application number PCT/US2007/080331, filed Oct. 3, 2007, also describes formulations that are amenable to the present disclosure.

[0536] Surfactants find wide application in formulations such as those described herein, particularly in emulsions (including microemulsions) and liposomes. The most common way of classifying and ranking the properties of the many different types of surfactants, both natural and synthetic, is by the use of the hydrophile/lipophile balance (HLB). The nature of the hydrophilic group (also known as the “head”) provides the most useful means for categorizing the different surfactants used in formulations (Rieger, in Pharmaceutical Dosage Forms, Marcel Dekker, Inc., New York, N.Y., 1988, p. 285).

[0537] If the surfactant molecule is not ionized, it is classified as a nonionic surfactant. Nonionic surfactants find wide application in pharmaceutical and cosmetic products and are usable over a wide range of pH values. In general, their HLB values range from 2 to about 18 depending on their structure. Nonionic surfactants include nonionic esters such as ethylene glycol esters, propylene glycol esters, glyceryl esters, polyglyceryl esters, sorbitan esters, sucrose esters, and ethoxylated esters. Nonionic alkanolamides and ethers such as fatty alcohol ethoxylates, propoxylated alcohols, and ethoxylated/propoxylated block polymers are also included in this class. The polyoxyethylene surfactants are the most popular members of the nonionic surfactant class.

[0538] If the surfactant molecule carries a negative charge when it is dissolved or dispersed in water, the surfactant is classified as anionic. Anionic surfactants include carboxylates such as soaps, acyl lactylates, acyl amides of amino acids, esters of sulfuric acid such as alkyl sulfates and ethoxylated alkyl sulfates, sulfonates such as alkyl benzene sulfonates, acyl isethionates, acyl taurates and sulfosuccinates, and phosphates. The most important members of the anionic surfactant class are the alkyl sulfates and the soaps.

[0539] If the surfactant molecule carries a positive charge when it is dissolved or dispersed in water, the surfactant is classified as cationic. Cationic surfactants include quaternary ammonium salts and ethoxylated amines. The quaternary ammonium salts are the most used members of this class.

[0540] If the surfactant molecule has the ability to carry either a positive or negative charge, the surfactant is classified as amphoteric. Amphoteric surfactants include acrylic acid derivatives, substituted alkylamides, N-alkylbetaines and phosphatides.

[0541] The use of surfactants in drug products, formulations and in emulsions has been reviewed (Rieger, in Pharmaceutical Dosage Forms, Marcel Dekker, Inc., New York, N.Y., 1988, p. 285).

[0542] The RNAi agent for use in the methods of the disclosure can also be provided as micellar formulations. “Micelles” are defined herein as a particular type of molecular assembly in which amphipathic molecules are arranged in a spherical structure such that all the hydrophobic portions of the molecules are directed inward, leaving the hydrophilic portions in contact with the surrounding aqueous phase. The converse arrangement exists if the environment is hydrophobic.

[0543] A mixed micellar formulation suitable for delivery through transdermal membranes may be prepared by mixing an aqueous solution of the siRNA composition, an alkali metal C₈ to C22 alkyl sulphate, and a micelle forming compounds. Exemplary micelle forming compounds include lecithin, hyaluronic acid, pharmaceutically acceptable salts of hyaluronic acid, glycolic acid, lactic acid, chamomile extract, cucumber extract, oleic acid, linoleic acid, linolenic acid, monoolein, monooleates, monolaurates, borage oil, evening of primrose oil, menthol, trihydroxy oxo cholanyl glycine and pharmaceutically acceptable salts thereof, glycerin, polyglycerin, lysine, polylysine, triolein, polyoxyethylene ethers and analogues thereof, polidocanol alkyl ethers and analogues thereof, chenodeoxycholate, deoxycholate, and mixtures thereof. The micelle forming compounds may be added at the same time or after addition of the alkali metal alkyl sulphate. Mixed micelles will form with substantially any kind of mixing of the ingredients but vigorous mixing in order to provide smaller size micelles.

[0544] In one method a first micellar composition is prepared which contains the siRNA composition and at least the alkali metal alkyl sulphate. The first micellar composition is then mixed with at least three micelle forming compounds to form a mixed micellar composition. In another method, the micellar composition is prepared by mixing the siRNA composition, the alkali metal alkyl sulphate and at least one of the micelle forming compounds, followed by addition of the remaining micelle forming compounds, with vigorous mixing.

[0545] Phenol or m-cresol may be added to the mixed micellar composition to stabilize the formulation and protect against bacterial growth. Alternatively, phenol or m-cresol may be added with the micelle forming ingredients. An isotonic agent such as glycerin may also be added after formation of the mixed micellar composition.

[0546] For delivery of the micellar formulation as a spray, the formulation can be put into an aerosol dispenser and the dispenser is charged with a propellant. The propellant, which is under pressure, is in liquid form in the dispenser. The ratios of the ingredients are adjusted so that the aqueous and propellant phases become one, i.e., there is one phase. If there are two phases, it is necessary to shake the dispenser prior to dispensing a portion of the contents, e.g., through a metered valve. The dispensed dose of pharmaceutical agent is propelled from the metered valve in a fine spray.

[0547] Propellants may include hydrogen-containing chlorofluorocarbons, hydrogen-containing fluorocarbons, dimethyl ether and diethyl ether. In certain embodiments, HFA 134a (1,1,1,2 tetrafluoroethane) may be used.

[0548] The specific concentrations of the essential ingredients can be determined by relatively straightforward experimentation. For absorption through the oral cavities, it is often desirable to increase, e.g., at least double or triple, the dosage for through injection or administration through the gastrointestinal tract.

### Lipid Particles

[0549] RNAi agents, e.g., dsRNAs of in the disclosure may be fully encapsulated in a lipid formulation, e.g., a LNP, or other nucleic acid-lipid particle.

[0550] As used herein, the term “LNP” refers to a stable nucleic acid-lipid particle. LNPs typically contain a cationic lipid, a non-cationic lipid, and a lipid that prevents aggregation of the particle (e.g., a PEG-lipid conjugate). LNPs are extremely useful for systemic applications, as they exhibit extended circulation lifetimes following intravenous (i.v.) injection and accumulate at distal sites (e.g., sites physically separated from the administration site). LNPs include “pSPLP,” which include an encapsulated condensing agent-nucleic acid complex as set forth in WO 00/03683. LNP-formulated particles typically have a mean diameter of about 50 nm to about 150 nm, more typically about 60 nm to about 130 nm, more typically about 70 nm to about 110 nm, most typically about 70 nm to about 90 nm, and are substantially nontoxic. In addition, nucleic acids when present in the nucleic acid-lipid particles are resistant in aqueous solution to degradation with a nuclease. Nucleic acid-lipid particles and their method of preparation are disclosed in, e.g., U.S. Pat. Nos. 5,976,567; 5,981,501; 6,534,484; 6,586,410; 6,815,432; United States Patent publication No. 2010/0324120 and WO 96/40964.

[0551] In one embodiment, the lipid to drug ratio (mass/mass ratio) (e.g., lipid to dsRNA ratio) will be in the range of from about 1:1 to about 50:1, from about 1:1 to about 25:1, from about 3:1 to about 15:1, from about 4:1 to about 10:1, from about 5:1 to about 9:1, or about 6:1 to about 9:1. Ranges intermediate to the above recited ranges are also contemplated to be part of the disclosure.

[0552] Certain specific LNP formulations for delivery of RNAi agents have been described in the art, including, e.g., “LNP01” formulations as described in, e.g., WO 2008/042973, which is hereby incorporated by reference.

[0553] Additional exemplary lipid-dsRNA formulations are identified in the chart below.

| | | cationic lipid/non-cationic |
|---|---|---|
| | | lipid/cholesterol/PEG-lipid conjugate |
| | Ionizable/Cationic Lipid | Lipid:siRNA ratio |
| SNALP-1 | 1,2-Dilinolenyloxy-N,N- | DLinDMA/DPPC/Cholesterol/PEG- |
| | dimethylaminopropane (DLinDMA) | cDMA |
| | | (57.1/7.1/34.4/1.4) |
| | | lipid:siRNA~7:1 |
| 2-XTC | 2,2-Dilinoleyl-4-dimethylaminoethyl-[1,3]- | XTC/DPPC/Cholesterol/PEG-cDMA |
| | dioxolane (XTC) | 57.1/7.1/34.4/1.4 |
| | | lipid:siRNA~7:1 |
| LNP05 | 2,2-Dilinoleyl-4-dimethylaminoethyl-[1,3]- | XTC/DSPC/Cholesterol/PEG-DMG |
| | dioxolane (XTC) | 57.5/7.5/31.5/3.5 |
| | | lipid:siRNA~6:1 |
| LNP06 | 2,2-Dilinoleyl-4-dimethylaminoethyl-[1,3]- | XTC/DSPC/Cholesterol/PEG-DMG |
| | dioxolane (XTC) | 57.5/7.5/31.5/3.5 |
| | | lipid:siRNA~11:1 |
| LNP07 | 2,2-Dilinoleyl-4-dimethylaminoethyl-[1,3]- | XTC/DSPC/Cholesterol/PEG-DMG |
| | dioxolane (XTC) | 60/7.5/31/1.5, |
| | | lipid:siRNA~6:1 |
| LNP08 | 2,2-Dilinoleyl-4-dimethylaminoethyl-[1,3]- | XTC/DSPC/Cholesterol/PEG-DMG |
| | dioxolane (XTC) | 60/7.5/31/1.5, |
| | | lipid:siRNA~11:1 |
| LNP09 | 2,2-Dilinoleyl-4-dimethylaminoethyl-[1,3]- | XTC/DSPC/Cholesterol/PEG-DMG |
| | dioxolane (XTC) | 50/10/38.5/1.5 |
| | | Lipid:siRNA 10:1 |
| LNP10 | (3aR,5s,6aS)-N,N-dimethyl-2,2- | ALN100/DSPC/Cholesterol/PEG- |
| | di((9Z,12Z)-octadeca-9,12- | DMG |
| | dienyl)tetrahydro-3aH- | 50/10/38.5/1.5 |
| | cyclopenta[d][1,3]dioxol-5-amine | Lipid:siRNA 10:1 |
| | (ALN100) | |
| LNP11 | (6Z,9Z,28Z,31Z)-heptatriaconta-6,9,28,31- | MC-3/DSPC/Cholesterol/PEG-DMG |
| | tetraen-19-yl 4-(dimethylamino)butanoate | 50/10/38.5/1.5 |
| | (MC3) | Lipid:siRNA 10:1 |
| LNP12 | 1,1′-(2-(4-(2-((2-(bis(2- | Tech G1/DSPC/Cholesterol/PEG- |
| | hydroxydodecyl)amino)ethyl)(2- | DMG |
| | hydroxydodecyl)amino)ethyl)piperazin-1- | 50/10/38.5/1.5 |
| | yl)ethylazanediyl)didodecan-2-ol (Tech | Lipid:siRNA 10:1 |
| | G1) | |
| LNP13 | XTC | XTC/DSPC/Chol/PEG-DMG |
| | | 50/10/38.5/1.5 |
| | | Lipid:siRNA:33:1 |
| LNP14 | MC3 | MC3/DSPC/Chol/PEG-DMG |
| | | 40/15/40/5 |
| | | Lipid:siRNA:11:1 |
| LNP15 | MC3 | MC3/DSPC/Chol/PEG-DSG/GalNAc- |
| | | PEG-DSG |
| | | 50/10/35/4.5/0.5 |
| | | Lipid:siRNA:11:1 |
| LNP16 | MC3 | MC3/DSPC/Chol/PEG-DMG |
| | | 50/10/38.5/1.5 |
| | | Lipid:siRNA:7:1 |
| LNP17 | MC3 | MC3/DSPC/Chol/PEG-DSG |
| | | 50/10/38.5/1.5 |
| | | Lipid:siRNA:10:1 |
| LNP18 | MC3 | MC3/DSPC/Chol/PEG-DMG |
| | | 50/10/38.5/1.5 |
| | | Lipid:siRNA:12:1 |
| LNP19 | MC3 | MC3/DSPC/Chol/PEG-DMG |
| | | 50/10/35/5 |
| | | Lipid:siRNA:8:1 |
| LNP20 | MC3 | MC3/DSPC/Chol/PEG-DPG |
| | | 50/10/38.5/1.5 |
| | | Lipid:siRNA:10:1 |
| LNP21 | C12-200 | C12-200/DSPC/Chol/PEG-DSG |
| | | 50/10/38.5/1.5 |
| | | Lipid:siRNA:7:1 |
| LNP22 | XTC | XTC/DSPC/Chol/PEG-DSG |
| | | 50/10/38.5/1.5 |
| | | Lipid:siRNA:10:1 |

DSPC: distearoylphosphatidylcholine
DPPC: dipalmitoylphosphatidylcholine
PEG-DMG: PEG-didimyristoyl glycerol (C14-PEG, or PEG-C14) (PEG with avg mol wt of 2000)
PEG-DSG: PEG-distyryl glycerol (C18-PEG, or PEG-C18) (PEG with avg mol wt of 2000)
PEG-cDMA: PEG-carbamoyl-1,2-dimyristyloxypropylamine (PEG with avg mol wt of 2000)
SNALP (1,2-Dilinolenyloxy-N,N-dimethylaminopropane (DLinDMA)) comprising formulations are described in WO 2009/127060, which is hereby incorporated by reference.
XTC comprising formulations are described in WO 2010/088537, the entire contents of which are hereby incorporated herein by reference.
MC3 comprising formulations are described, e.g., in United States Patent Publication No. 2010/0324120, the entire contents of which are hereby incorporated by reference.
ALNY-100 comprising formulations are described in WO 2010/054406, the entire contents of which are hereby incorporated herein by reference.
C12-200 comprising formulations are described in WO 2010/129709, the entire contents of which are hereby incorporated herein by reference.

[0554] Compositions and formulations for oral administration include powders or granules, microparticulates, nanoparticulates, suspensions or solutions in water or non-aqueous media, capsules, gel capsules, sachets, tablets or minitablets. Thickeners, flavoring agents, diluents, emulsifiers, dispersing aids or binders can be desirable. In some embodiments, oral formulations are those in which dsRNAs featured in the disclosure are administered in conjunction with one or more penetration enhancer surfactants and chelators. Suitable surfactants include fatty acids or esters or salts thereof, bile acids or salts thereof. Suitable bile acids/salts include chenodeoxycholic acid (CDCA) and ursodeoxychenodeoxycholic acid (UDCA), cholic acid, dehydrocholic acid, deoxycholic acid, glucholic acid, glycholic acid, glycodeoxycholic acid, taurocholic acid, taurodeoxycholic acid, sodium tauro-24,25-dihydro-fusidate and sodium glycodihydrofusidate. Suitable fatty acids include arachidonic acid, undecanoic acid, oleic acid, lauric acid, caprylic acid, capric acid, myristic acid, palmitic acid, stearic acid, linoleic acid, linolenic acid, dicaprate, tricaprate, monoolein, dilaurin, glyceryl 1-monocaprate, 1-dodecylazacycloheptan-2-one, an acylcarnitine, an acylcholine, or a monoglyceride, a diglyceride or a pharmaceutically acceptable salt thereof (e.g., sodium). In some embodiments, combinations of penetration enhancers are used, for example, fatty acids/salts in combination with bile acids/salts. One exemplary combination is the sodium salt of lauric acid, capric acid and UDCA. Further penetration enhancers include polyoxyethylene-9-lauryl ether, polyoxyethylene-20-cetyl ether. DsRNAs featured in the disclosure can be delivered orally, in granular form including sprayed dried particles, or complexed to form micro or nanoparticles. DsRNA complexing agents include poly-amino acids; polyimines; polyacrylates; polyalkylacrylates, polyoxethanes, polyalkylcyanoacrylates; cationized gelatins, albumins, starches, acrylates, polyethyleneglycols (PEG) and starches; polyalkylcyanoacrylates; DEAE-derivatized polyimines, pollulans, celluloses and starches. Suitable complexing agents include chitosan, N-trimethylchitosan, poly-L-lysine, polyhistidine, polyornithine, polyspermines, protamine, polyvinylpyridine, polythiodiethylaminomethylethylene P(TDAE), polyaminostyrene (e.g., p-amino), poly(methylcyanoacrylate), poly(ethylcyanoacrylate), poly(butylcyanoacrylate), poly(isobutylcyanoacrylate), poly(isohexylcynaoacrylate), DEAE-methacrylate, DEAE-hexylacrylate, DEAE-acrylamide, DEAE-albumin and DEAE-dextran, polymethylacrylate, polyhexylacrylate, poly(D,L-lactic acid), poly(DL-lactic-co-glycolic acid (PLGA), alginate, and polyethyleneglycol (PEG). Oral formulations for dsRNAs and their preparation are described in detail in U.S. Pat. No. 6,887,906, U.S. 2003/0027780, and U.S. Pat. No. 6,747,014, each of which is incorporated herein by reference.

[0555] Compositions and formulations for parenteral, intraparenchymal (into the brain), intrathecal, intraventricular or intrahepatic administration can include sterile aqueous solutions which can also contain buffers, diluents and other suitable additives such as, but not limited to, penetration enhancers, carrier compounds and other pharmaceutically acceptable carriers or excipients.

[0556] Pharmaceutical compositions of the present disclosure include, but are not limited to, solutions, emulsions, and liposome-containing formulations. These compositions can be generated from a variety of components that include, but are not limited to, preformed liquids, self-emulsifying solids and self-emulsifying semisolids. Particularly preferred are formulations that target the brain when treating SNCA-associated diseases or disorders.

[0557] The pharmaceutical formulations of the present disclosure, which can conveniently be presented in unit dosage form, can be prepared according to conventional techniques well known in the pharmaceutical industry. Such techniques include the step of bringing into association the active ingredients with the pharmaceutical carrier(s) or excipient(s). In general, the formulations are prepared by uniformly and intimately bringing into association the active ingredients with liquid carriers or finely divided solid carriers or both, and then, if necessary, shaping the product.

[0558] The compositions of the present disclosure can be formulated into any of many possible dosage forms such as, but not limited to, tablets, capsules, gel capsules, liquid syrups, soft gels, suppositories, and enemas. The compositions of the present disclosure can also be formulated as suspensions in aqueous, non-aqueous or mixed media. Aqueous suspensions can further contain substances which increase the viscosity of the suspension including, for example, sodium carboxymethylcellulose, sorbitol or dextran. The suspension can also contain stabilizers.

### Additional Formulations

i. Emulsions

[0559] The compositions of the present disclosure can be prepared and formulated as emulsions. Emulsions are typically heterogeneous systems of one liquid dispersed in another in the form of droplets usually exceeding 0.1 m in diameter (see e.g., Ansel's Pharmaceutical Dosage Forms and Drug Delivery Systems, Allen, LV., Popovich NG., and Ansel HC., 2004, Lippincott Williams & Wilkins (8th ed.), New York, NY; Idson, in Pharmaceutical Dosage Forms, Lieberman, Rieger and Banker (Eds.), 1988, Marcel Dekker, Inc., New York, N.Y., volume 1, p. 199; Rosoff, in Pharmaceutical Dosage Forms, Lieberman, Rieger and Banker (Eds.), 1988, Marcel Dekker, Inc., New York, N.Y., Volume 1, p. 245; Block in Pharmaceutical Dosage Forms, Lieberman, Rieger and Banker (Eds.), 1988, Marcel Dekker, Inc., New York, N.Y., volume 2, p. 335; Higuchi et al., in Remington's Pharmaceutical Sciences, Mack Publishing Co., Easton, Pa., 1985, p. 301). Emulsions are often biphasic systems comprising two immiscible liquid phases intimately mixed and dispersed with each other. In general, emulsions can be of either the water-in-oil (w/o) or the oil-in-water (o/w) variety. When an aqueous phase is finely divided into and dispersed as minute droplets into a bulk oily phase, the resulting composition is called a water-in-oil (w/o) emulsion. Alternatively, when an oily phase is finely divided into and dispersed as minute droplets into a bulk aqueous phase, the resulting composition is called an oil-in-water (o/w) emulsion. Emulsions can contain additional components in addition to the dispersed phases, and the active drug which can be present as a solution in either aqueous phase, oily phase or itself as a separate phase. Pharmaceutical excipients such as emulsifiers, stabilizers, dyes, and anti-oxidants can also be present in emulsions as needed. Pharmaceutical emulsions can also be multiple emulsions that are comprised of more than two phases such as, for example, in the case of oil-in-water-in-oil (o/w/o) and water-in-oil-in-water (w/o/w) emulsions. Such complex formulations often provide certain advantages that simple binary emulsions do not. Multiple emulsions in which individual oil droplets of an o/w emulsion enclose small water droplets constitute a w/o/w emulsion. Likewise, a system of oil droplets enclosed in globules of water stabilized in an oily continuous phase provides an o/w/o emulsion.

[0560] Emulsions are characterized by little or no thermodynamic stability. Often, the dispersed or discontinuous phase of the emulsion is well dispersed into the external or continuous phase and maintained in this form through the means of emulsifiers or the viscosity of the formulation. Either of the phases of the emulsion can be a semisolid or a solid, as is the case of emulsion-style ointment bases and creams. Other means of stabilizing emulsions entail the use of emulsifiers that can be incorporated into either phase of the emulsion. Emulsifiers can broadly be classified into four categories: synthetic surfactants, naturally occurring emulsifiers, absorption bases, and finely dispersed solids (see e.g., Ansel's Pharmaceutical Dosage Forms and Drug Delivery Systems, Allen, LV., Popovich NG., and Ansel HC., 2004, Lippincott Williams & Wilkins (8th ed.), New York, NY; Idson, in Pharmaceutical Dosage Forms, Lieberman, Rieger and Banker (Eds.), 1988, Marcel Dekker, Inc., New York, N.Y., volume 1, p. 199).

[0561] Synthetic surfactants, also known as surface active agents, have found wide applicability in the formulation of emulsions and have been reviewed in the literature (see e.g., Ansel's Pharmaceutical Dosage Forms and Drug Delivery Systems, Allen, LV., Popovich NG., and Ansel HC., 2004, Lippincott Williams & Wilkins (8th ed.), New York, NY; Rieger, in Pharmaceutical Dosage Forms, Lieberman, Rieger and Banker (Eds.), 1988, Marcel Dekker, Inc., New York, N.Y., volume 1, p. 285; Idson, in Pharmaceutical Dosage Forms, Lieberman, Rieger and Banker (Eds.), Marcel Dekker, Inc., New York, N.Y., 1988, volume 1, p. 199). Surfactants are typically amphiphilic and comprise a hydrophilic and a hydrophobic portion. The ratio of the hydrophilic to the hydrophobic nature of the surfactant has been termed the hydrophile/lipophile balance (HLB) and is a valuable tool in categorizing and selecting surfactants in the preparation of formulations. Surfactants can be classified into different classes based on the nature of the hydrophilic group: nonionic, anionic, cationic and amphoteric (see e.g., Ansel's Pharmaceutical Dosage Forms and Drug Delivery Systems, Allen, LV., Popovich NG., and Ansel HC., 2004, Lippincott Williams & Wilkins (8th ed.), New York, NY Rieger, in Pharmaceutical Dosage Forms, Lieberman, Rieger and Banker (Eds.), 1988, Marcel Dekker, Inc., New York, N.Y., volume 1, p. 285).

[0562] Naturally occurring emulsifiers used in emulsion formulations include lanolin, beeswax, phosphatides, lecithin and acacia. Absorption bases possess hydrophilic properties such that they can soak up water to form w/o emulsions yet retain their semisolid consistencies, such as anhydrous lanolin and hydrophilic petrolatum. Finely divided solids have also been used as good emulsifiers especially in combination with surfactants and in viscous preparations. These include polar inorganic solids, such as heavy metal hydroxides, nonswelling clays such as bentonite, attapulgite, hectorite, kaolin, montmorillonite, colloidal aluminum silicate and colloidal magnesium aluminum silicate, pigments and nonpolar solids such as carbon or glyceryl tristearate.

[0563] A large variety of non-emulsifying materials are also included in emulsion formulations and contribute to the properties of emulsions. These include fats, oils, waxes, fatty acids, fatty alcohols, fatty esters, humectants, hydrophilic colloids, preservatives and antioxidants (Block, in Pharmaceutical Dosage Forms, Lieberman, Rieger and Banker (Eds.), 1988, Marcel Dekker, Inc., New York, N.Y., volume 1, p. 335; Idson, in Pharmaceutical Dosage Forms, Lieberman, Rieger and Banker (Eds.), 1988, Marcel Dekker, Inc., New York, N.Y., volume 1, p. 199).

[0564] Hydrophilic colloids or hydrocolloids include naturally occurring gums and synthetic polymers such as polysaccharides (for example, acacia, agar, alginic acid, carrageenan, guar gum, karaya gum, and tragacanth), cellulose derivatives (for example, carboxymethylcellulose and carboxypropylcellulose), and synthetic polymers (for example, carbomers, cellulose ethers, and carboxyvinyl polymers). These disperse or swell in water to form colloidal solutions that stabilize emulsions by forming strong interfacial films around the dispersed-phase droplets and by increasing the viscosity of the external phase.

[0565] Since emulsions often contain a number of ingredients such as carbohydrates, proteins, sterols and phosphatides that can readily support the growth of microbes, these formulations often incorporate preservatives. Commonly used preservatives included in emulsion formulations include methyl paraben, propyl paraben, quaternary ammonium salts, benzalkonium chloride, esters of p-hydroxybenzoic acid, and boric acid. Antioxidants are also commonly added to emulsion formulations to prevent deterioration of the formulation. Antioxidants used can be free radical scavengers such as tocopherols, alkyl gallates, butylated hydroxyanisole, butylated hydroxytoluene, or reducing agents such as ascorbic acid and sodium metabisulfite, and antioxidant synergists such as citric acid, tartaric acid, and lecithin.

[0566] The application of emulsion formulations via dermatological, oral and parenteral routes and methods for their manufacture have been reviewed in the literature (see e.g., Ansel's Pharmaceutical Dosage Forms and Drug Delivery Systems, Allen, LV., Popovich NG., and Ansel HC., 2004, Lippincott Williams & Wilkins (8th ed.), New York, NY; Idson, in Pharmaceutical Dosage Forms, Lieberman, Rieger and Banker (Eds.), 1988, Marcel Dekker, Inc., New York, N.Y., volume 1, p. 199). Emulsion formulations for oral delivery have been very widely used because of ease of formulation, as well as efficacy from an absorption and bioavailability standpoint (see e.g., Ansel's Pharmaceutical Dosage Forms and Drug Delivery Systems, Allen, LV., Popovich NG., and Ansel HC., 2004, Lippincott Williams & Wilkins (8th ed.), New York, NY; Rosoff, in Pharmaceutical Dosage Forms, Lieberman, Rieger and Banker (Eds.), 1988, Marcel Dekker, Inc., New York, N.Y., volume 1, p. 245; Idson, in Pharmaceutical Dosage Forms, Lieberman, Rieger and Banker (Eds.), 1988, Marcel Dekker, Inc., New York, N.Y., volume 1, p. 199). Mineral-oil base laxatives, oil-soluble vitamins and high fat nutritive preparations are among the materials that have commonly been administered orally as o/w emulsions.

ii. Microemulsions

[0567] In one embodiment of the present disclosure, the compositions of RNAi agents and nucleic acids are formulated as microemulsions. A microemulsion can be defined as a system of water, oil and amphiphile which is a single optically isotropic and thermodynamically stable liquid solution (see e.g., Ansel's Pharmaceutical Dosage Forms and Drug Delivery Systems, Allen, LV., Popovich NG., and Ansel HC., 2004, Lippincott Williams & Wilkins (8th ed.), New York, NY; Rosoff, in Pharmaceutical Dosage Forms, Lieberman, Rieger and Banker (Eds.), 1988, Marcel Dekker, Inc., New York, N.Y., volume 1, p. 245). Typically, microemulsions are systems that are prepared by first dispersing an oil in an aqueous surfactant solution and then adding a sufficient amount of a fourth component, generally an intermediate chain-length alcohol to form a transparent system. Therefore, microemulsions have also been described as thermodynamically stable, isotropically clear dispersions of two immiscible liquids that are stabilized by interfacial films of surface-active molecules (Leung and Shah, in: Controlled Release of Drugs: Polymers and Aggregate Systems, Rosoff, M., Ed., 1989, VCH Publishers, New York, pages 185-215). Microemulsions commonly are prepared via a combination of three to five components that include oil, water, surfactant, cosurfactant and electrolyte. Whether the microemulsion is of the water-in-oil (w/o) or an oil-in-water (o/w) type is dependent on the properties of the oil and surfactant used, and on the structure and geometric packing of the polar heads and hydrocarbon tails of the surfactant molecules (Schott, in Remington's Pharmaceutical Sciences, Mack Publishing Co., Easton, Pa., 1985, p. 271).

[0568] The phenomenological approach utilizing phase diagrams has been extensively studied and has yielded a comprehensive knowledge, to one skilled in the art, of how to formulate microemulsions (see e.g., Ansel's Pharmaceutical Dosage Forms and Drug Delivery Systems, Allen, LV., Popovich NG., and Ansel HC., 2004, Lippincott Williams & Wilkins (8th ed.), New York, NY; Rosoff, in Pharmaceutical Dosage Forms, Lieberman, Rieger and Banker (Eds.), 1988, Marcel Dekker, Inc., New York, N.Y., volume 1, p. 245; Block, in Pharmaceutical Dosage Forms, Lieberman, Rieger and Banker (Eds.), 1988, Marcel Dekker, Inc., New York, N.Y., volume 1, p. 335). Compared to conventional emulsions, microemulsions offer the advantage of solubilizing water-insoluble drugs in a formulation of thermodynamically stable droplets that are formed spontaneously.

[0569] Surfactants used in the preparation of microemulsions include, but are not limited to, ionic surfactants, non-ionic surfactants, Brij 96, polyoxyethylene oleyl ethers, polyglycerol fatty acid esters, tetraglycerol monolaurate (ML310), tetraglycerol monooleate (MO310), hexaglycerol monooleate (PO310), hexaglycerol pentaoleate (PO500), decaglycerol monocaprate (MCA750), decaglycerol monooleate (MO750), decaglycerol sequioleate (SO750), decaglycerol decaoleate (DAO750), alone or in combination with cosurfactants. The cosurfactant, usually a short-chain alcohol such as ethanol, 1-propanol, and 1-butanol, serves to increase the interfacial fluidity by penetrating into the surfactant film and consequently creating a disordered film because of the void space generated among surfactant molecules. Microemulsions can, however, be prepared without the use of cosurfactants and alcohol-free self-emulsifying microemulsion systems are known in the art. The aqueous phase can typically be, but is not limited to, water, an aqueous solution of the drug, glycerol, PEG300, PEG400, polyglycerols, propylene glycols, and derivatives of ethylene glycol. The oil phase can include, but is not limited to, materials such as Captex 300, Captex 355, Capmul MCM, fatty acid esters, medium chain (C8-C12) mono, di, and tri-glycerides, polyoxyethylated glyceryl fatty acid esters, fatty alcohols, polyglycolized glycerides, saturated polyglycolized C8-C10 glycerides, vegetable oils and silicone oil.

[0570] Microemulsions are particularly of interest from the standpoint of drug solubilization and the enhanced absorption of drugs. Lipid based microemulsions (both o/w and w/o) have been proposed to enhance the oral bioavailability of drugs, including peptides (see e.g., U.S. Pat. Nos. 6,191,105; 7,063,860; 7,070,802; 7,157,099; Constantinides et al., Pharmaceutical Research, 1994, 11, 1385-1390; Ritschel, Meth. Find. Exp. Clin. Pharmacol., 1993, 13, 205). Microemulsions afford advantages of improved drug solubilization, protection of drug from enzymatic hydrolysis, possible enhancement of drug absorption due to surfactant-induced alterations in membrane fluidity and permeability, ease of preparation, ease of oral administration over solid dosage forms, improved clinical potency, and decreased toxicity (see e.g., U.S. Pat. Nos. 6,191,105; 7,063,860; 7,070,802; 7,157,099; Constantinides et al., Pharmaceutical Research, 1994, 11, 1385; Ho et al., J. Pharm. Sci., 1996, 85, 138-143). Often microemulsions can form spontaneously when their components are brought together at ambient temperature. This can be particularly advantageous when formulating thermolabile drugs, peptides or RNAi agents. Microemulsions have also been effective in the transdermal delivery of active components in both cosmetic and pharmaceutical applications. It is expected that the microemulsion compositions and formulations of the present disclosure will facilitate the increased systemic absorption of RNAi agents and nucleic acids from the gastrointestinal tract, as well as improve the local cellular uptake of RNAi agents and nucleic acids.

[0571] Microemulsions of the present disclosure can also contain additional components and additives such as sorbitan monostearate (Grill 3), Labrasol, and penetration enhancers to improve the properties of the formulation and to enhance the absorption of the RNAi agents and nucleic acids of the present disclosure. Penetration enhancers used in the microemulsions of the present disclosure can be classified as belonging to one of five broad categories—surfactants, fatty acids, bile salts, chelating agents, and non-chelating non-surfactants (Lee et al., Critical Reviews in Therapeutic Drug Carrier Systems, 1991, p. 92). Each of these classes has been discussed above.

iii. Microparticles

[0572] An RNAi agent of the disclosure may be incorporated into a particle, e.g., a microparticle.

[0573] Microparticles can be produced by spray-drying, but may also be produced by other methods including lyophilization, evaporation, fluid bed drying, vacuum drying, or a combination of these techniques.

iv. Penetration Enhancers

[0574] In one embodiment, the present disclosure employs various penetration enhancers to effect the efficient delivery of nucleic acids, particularly RNAi agents, to the skin of animals. Most drugs are present in solution in both ionized and nonionized forms. However, usually only lipid soluble or lipophilic drugs readily cross cell membranes. It has been discovered that even non-lipophilic drugs can cross cell membranes if the membrane to be crossed is treated with a penetration enhancer. In addition to aiding the diffusion of non-lipophilic drugs across cell membranes, penetration enhancers also enhance the permeability of lipophilic drugs.

[0575] Penetration enhancers can be classified as belonging to one of five broad categories, i.e., surfactants, fatty acids, bile salts, chelating agents, and non-chelating non-surfactants (see e.g., Malmsten, M. Surfactants and polymers in drug delivery, Informa Health Care, New York, NY, 2002; Lee et al., Critical Reviews in Therapeutic Drug Carrier Systems, 1991, p. 92). Each of the above-mentioned classes of penetration enhancers are described below in greater detail.

[0576] Surfactants (or “surface-active agents”) are chemical entities which, when dissolved in an aqueous solution, reduce the surface tension of the solution or the interfacial tension between the aqueous solution and another liquid, with the result that absorption of RNAi agents through the mucosa is enhanced. In addition to bile salts and fatty acids, these penetration enhancers include, for example, sodium lauryl sulfate, polyoxyethylene-9-lauryl ether and polyoxyethylene-20-cetyl ether) (see e.g., Malmsten, M. Surfactants and polymers in drug delivery, Informa Health Care, New York, NY, 2002; Lee et al., Critical Reviews in Therapeutic Drug Carrier Systems, 1991, p. 92); and perfluorochemical emulsions, such as FC-43. Takahashi et al., J. Pharm. Pharmacol., 1988, 40, 252).

[0577] Various fatty acids and their derivatives which act as penetration enhancers include, for example, oleic acid, lauric acid, capric acid (n-decanoic acid), myristic acid, palmitic acid, stearic acid, linoleic acid, linolenic acid, dicaprate, tricaprate, monoolein (1-monooleoyl-rac-glycerol), dilaurin, caprylic acid, arachidonic acid, glycerol 1-monocaprate, 1-dodecylazacycloheptan-2-one, acylcarnitines, acylcholines, C₁₋₂₀ alkyl esters thereof (e.g., methyl, isopropyl and t-butyl), and mono- and di-glycerides thereof (i.e., oleate, laurate, caprate, myristate, palmitate, stearate, linoleate, etc.) (see e.g., Touitou, E., et al. Enhancement in Drug Delivery, CRC Press, Danvers, MA, 2006; Lee et al., Critical Reviews in Therapeutic Drug Carrier Systems, 1991, p. 92; Muranishi, Critical Reviews in Therapeutic Drug Carrier Systems, 1990, 7, 1-33; El Hariri et al., J. Pharm. Pharmacol., 1992, 44, 651-654).

[0578] The physiological role of bile includes the facilitation of dispersion and absorption of lipids and fat-soluble vitamins (see e.g., Malmsten, M. Surfactants and polymers in drug delivery, Informa Health Care, New York, NY, 2002; Brunton, Chapter 38 in: Goodman & Gilman's The Pharmacological Basis of Therapeutics, 9th Ed., Hardman et al. Eds., McGraw-Hill, New York, 1996, pp. 934-935). Various natural bile salts, and their synthetic derivatives, act as penetration enhancers. Thus the term “bile salts” includes any of the naturally occurring components of bile as well as any of their synthetic derivatives. Suitable bile salts include, for example, cholic acid (or its pharmaceutically acceptable sodium salt, sodium cholate), dehydrocholic acid (sodium dehydrocholate), deoxycholic acid (sodium deoxycholate), glucholic acid (sodium glucholate), glycholic acid (sodium glycocholate), glycodeoxycholic acid (sodium glycodeoxycholate), taurocholic acid (sodium taurocholate), taurodeoxycholic acid (sodium taurodeoxycholate), chenodeoxycholic acid (sodium chenodeoxycholate), ursodeoxycholic acid (UDCA), sodium tauro-24,25-dihydro-fusidate (STDHF), sodium glycodihydrofusidate and polyoxyethylene-9-lauryl ether (POE) (see e.g., Malmsten, M. Surfactants and polymers in drug delivery, Informa Health Care, New York, NY, 2002; Lee et al., Critical Reviews in Therapeutic Drug Carrier Systems, 1991, page 92; Swinyard, Chapter 39 In: Remington's Pharmaceutical Sciences, 18th Ed., Gennaro, ed., Mack Publishing Co., Easton, Pa., 1990, pages 782-783; Muranishi, Critical Reviews in Therapeutic Drug Carrier Systems, 1990, 7, 1-33; Yamamoto et al., J. Pharm. Exp. Ther., 1992, 263, 25; Yamashita et al., J. Pharm. Sci., 1990, 79, 579-583).

[0579] Chelating agents, as used in connection with the present disclosure, can be defined as compounds that remove metallic ions from solution by forming complexes therewith, with the result that absorption of RNAi agents through the mucosa is enhanced. With regards to their use as penetration enhancers in the present disclosure, chelating agents have the added advantage of also serving as DNase inhibitors, as most characterized DNA nucleases require a divalent metal ion for catalysis and are thus inhibited by chelating agents (Jarrett, J. Chromatogr., 1993, 618, 315-339). Suitable chelating agents include but are not limited to disodium ethylenediaminetetraacetate (EDTA), citric acid, salicylates (e.g., sodium salicylate, 5-methoxysalicylate and homovanilate), N-acyl derivatives of collagen, laureth-9 and N-amino acyl derivatives of beta-diketones (enamines)(see e.g., Katdare, A. et al., Excipient development for pharmaceutical, biotechnology, and drug delivery, CRC Press, Danvers, MA, 2006; Lee et al., Critical Reviews in Therapeutic Drug Carrier Systems, 1991, page 92; Muranishi, Critical Reviews in Therapeutic Drug Carrier Systems, 1990, 7, 1-33; Buur et al., J. Control Rel., 1990, 14, 43-51).

[0580] As used herein, non-chelating non-surfactant penetration enhancing compounds can be defined as compounds that demonstrate insignificant activity as chelating agents or as surfactants but that nonetheless enhance absorption of RNAi agents through the alimentary mucosa (see e.g., Muranishi, Critical Reviews in Therapeutic Drug Carrier Systems, 1990, 7, 1-33). This class of penetration enhancers includes, for example, unsaturated cyclic ureas, 1-alkyl- and 1-alkenylazacyclo-alkanone derivatives (Lee et al., Critical Reviews in Therapeutic Drug Carrier Systems, 1991, page 92); and non-steroidal anti-inflammatory agents such as diclofenac sodium, indomethacin and phenylbutazone (Yamashita et al., J. Pharm. Pharmacol., 1987, 39, 621-626).

[0581] Agents that enhance uptake of RNAi agents at the cellular level can also be added to the pharmaceutical and other compositions of the present disclosure. For example, cationic lipids, such as lipofectin (Junichi et al, U.S. Pat. No. 5,705,188), cationic glycerol derivatives, and polycationic molecules, such as polylysine (WO 97/30731), are also known to enhance the cellular uptake of dsRNAs.

[0582] Other agents can be utilized to enhance the penetration of the administered nucleic acids, including glycols such as ethylene glycol and propylene glycol, pyrrols such as 2-pyrrol, azones, and terpenes such as limonene and menthone.

vi. Excipients

[0583] In contrast to a carrier compound, a “pharmaceutical carrier” or “excipient” is a pharmaceutically acceptable solvent, suspending agent or any other pharmacologically inert vehicle for delivering one or more nucleic acids to an animal. The excipient can be liquid or solid and is selected, with the planned manner of administration in mind, so as to provide for the desired bulk, consistency, etc., when combined with a nucleic acid and the other components of a given pharmaceutical composition. Typical pharmaceutical carriers include, but are not limited to, binding agents (e.g., pregelatinized maize starch, polyvinylpyrrolidone or hydroxypropyl methylcellulose, etc.); fillers (e.g., lactose and other sugars, microcrystalline cellulose, pectin, gelatin, calcium sulfate, ethyl cellulose, polyacrylates or calcium hydrogen phosphate, etc.); lubricants (e.g., magnesium stearate, talc, silica, colloidal silicon dioxide, stearic acid, metallic stearates, hydrogenated vegetable oils, corn starch, polyethylene glycols, sodium benzoate, sodium acetate, etc.); disintegrants (e.g., starch, sodium starch glycolate, etc.); and wetting agents (e.g., sodium lauryl sulphate, etc).

[0584] Pharmaceutically acceptable organic or inorganic excipients suitable for non-parenteral administration which do not deleteriously react with nucleic acids can also be used to formulate the compositions of the present disclosure. Suitable pharmaceutically acceptable carriers include, but are not limited to, water, salt solutions, alcohols, polyethylene glycols, gelatin, lactose, amylose, magnesium stearate, talc, silicic acid, viscous paraffin, hydroxymethylcellulose, polyvinylpyrrolidone and the like.

[0585] Formulations for topical administration of nucleic acids can include sterile and non-sterile aqueous solutions, non-aqueous solutions in common solvents such as alcohols, or solutions of the nucleic acids in liquid or solid oil bases. The solutions can also contain buffers, diluents and other suitable additives. Pharmaceutically acceptable organic or inorganic excipients suitable for non-parenteral administration which do not deleteriously react with nucleic acids can be used.

[0586] Suitable pharmaceutically acceptable excipients include, but are not limited to, water, salt solutions, alcohol, polyethylene glycols, gelatin, lactose, amylose, magnesium stearate, talc, silicic acid, viscous paraffin, hydroxymethylcellulose, polyvinylpyrrolidone and the like.

vii. Other Components

[0587] The compositions of the present disclosure can additionally contain other adjunct components conventionally found in pharmaceutical compositions, at their art-established usage levels. Thus, for example, the compositions can contain additional, compatible, pharmaceutically-active materials such as, for example, antipruritics, astringents, local anesthetics or anti-inflammatory agents, or can contain additional materials useful in physically formulating various dosage forms of the compositions of the present disclosure, such as dyes, flavoring agents, preservatives, antioxidants, opacifiers, thickening agents and stabilizers. However, such materials, when added, should not unduly interfere with the biological activities of the components of the compositions of the present disclosure. The formulations can be sterilized and, if desired, mixed with auxiliary agents, e.g., lubricants, preservatives, stabilizers, wetting agents, emulsifiers, salts for influencing osmotic pressure, buffers, colorings, flavorings or aromatic substances and the like which do not deleteriously interact with the nucleic acid(s) of the formulation.

[0588] Aqueous suspensions can contain substances which increase the viscosity of the suspension including, for example, sodium carboxymethylcellulose, sorbitol or dextran. The suspension can also contain stabilizers.

[0589] In some embodiments, pharmaceutical compositions featured in the disclosure include (a) one or more RNAi agents and (b) one or more agents which function by a non-RNAi mechanism and which are useful in treating a SNCA-associated neurodegenerative disorder. Examples of such agents include, but are not limited to dopamine agonists and promoters, among others, including carbidopa-levodopa, levodopa, entacopone, tolcapone, opicapone, pramipexole, ropinirole, apomorphine, rotigotine, selegiline, rasagiline, safinamide, amantadine, istradefylline, trihexyphenidyl, benztropine, rivastigmine, donepezil, galantamine and memantine.

[0590] Toxicity and therapeutic efficacy of such compounds can be determined by standard pharmaceutical procedures in cell cultures or experimental animals, e.g., for determining the LD₅₀ (the dose lethal to 50% of the population) and the ED₅₀ (the dose therapeutically effective in 50% of the population). The dose ratio between toxic and therapeutic effects is the therapeutic index and it can be expressed as the ratio LD₅₀/ED₅₀. Compounds that exhibit high therapeutic indices are preferred.

[0591] The data obtained from cell culture assays and animal studies can be used in formulating a range of dosage for use in humans. The dosage of compositions featured herein in the disclosure lies generally within a range of circulating concentrations that include the ED₅₀ with little or no toxicity. The dosage can vary within this range depending upon the dosage form employed and the route of administration utilized. For any compound used in the methods featured in the disclosure, the therapeutically effective dose can be estimated initially from cell culture assays. A dose can be formulated in animal models to achieve a circulating plasma concentration range of the compound or, when appropriate, of the polypeptide product of a target sequence (e.g., achieving a decreased concentration of the polypeptide) that includes the IC₅₀ (i.e., the concentration of the test compound which achieves a half-maximal inhibition of symptoms) as determined in cell culture. Such information can be used to more accurately determine useful doses in humans. Levels in plasma can be measured, for example, by high performance liquid chromatography.

[0592] In addition to their administration, as discussed above, the RNAi agents featured in the disclosure can be administered in combination with other known agents effective in treatment of pathological processes mediated by nucleotide repeat expression. In any event, the administering physician can adjust the amount and timing of RNAi agent administration on the basis of results observed using standard measures of efficacy known in the art or described herein.

### VII. Kits

[0593] In certain aspects, the instant disclosure provides kits that include a suitable container containing a pharmaceutical formulation of a siRNA compound, e.g., a double-stranded siRNA compound, or siRNA compound, (e.g., a precursor, e.g., a larger siRNA compound which can be processed into a siRNA compound, or a DNA which encodes an siRNA compound, e.g., a double-stranded siRNA compound, or siRNA compound, or precursor thereof). In certain embodiments the individual components of the pharmaceutical formulation may be provided in one container. Alternatively, it may be desirable to provide the components of the pharmaceutical formulation separately in two or more containers, e.g., one container for a siRNA compound preparation, and at least another for a carrier compound. The kit may be packaged in a number of different configurations such as one or more containers in a single box. The different components can be combined, e.g., according to instructions provided with the kit. The components can be combined according to a method described herein, e.g., to prepare and administer a pharmaceutical composition. The kit can also include a delivery device.

### VIII. Methods for Inhibiting SNCA Expression

[0594] The present disclosure also provides methods of inhibiting expression of a SNCA gene in a cell. The methods include contacting a cell with an RNAi agent, e.g., double stranded RNAi agent, in an amount effective to inhibit expression of SNCA in the cell, thereby inhibiting expression of SNCA in the cell. In certain embodiments of the disclosure, SNCA is inhibited preferentially in CNS (e.g., brain) cells.

[0595] Contacting of a cell with an RNAi agent, e.g., a double stranded RNAi agent, may be done in vitro or in vivo. Contacting a cell in vivo with the RNAi agent includes contacting a cell or group of cells within a subject, e.g., a human subject, with the RNAi agent. Combinations of in vitro and in vivo methods of contacting a cell are also possible.

[0596] Contacting a cell may be direct or indirect, as discussed above. Furthermore, contacting a cell may be accomplished via a targeting ligand, including any ligand described herein or known in the art.

[0597] The term “inhibiting,” as used herein, is used interchangeably with “reducing,” “silencing,” “downregulating,” “suppressing” and other similar terms, and includes any level of inhibition. In certain embodiments, a level of inhibition, e.g., for an RNAi agent of the instant disclosure, can be assessed in cell culture conditions, e.g., wherein cells in cell culture are transfected via Lipofectamine™-mediated transfection at a concentration in the vicinity of a cell of 10 nM or less, 1 nM or less, etc. Knockdown of a given RNAi agent can be determined via comparison of pre-treated levels in cell culture versus post-treated levels in cell culture, optionally also comparing against cells treated in parallel with a scrambled or other form of control RNAi agent. Knockdown in cell culture of, e.g., optionally 50% or more, can thereby be identified as indicative of “inhibiting” or “reducing”, “downregulating” or “suppressing”, etc. having occurred. It is expressly contemplated that assessment of targeted mRNA or encoded protein levels (and therefore an extent of “inhibiting”, etc. caused by an RNAi agent of the disclosure) can also be assessed in in vivo systems for the RNAi agents of the instant disclosure, under properly controlled conditions as described in the art.

[0598] The phrase “inhibiting expression of a SNCA gene” or “inhibiting expression of SNCA,” as used herein, includes inhibition of expression of any SNCA gene (such as, e.g., a mouse SNCA gene, a rat SNCA gene, a monkey SNCA gene, or a human SNCA gene) as well as variants or mutants of a SNCA gene that encode a SNCA protein. Thus, the SNCA gene may be a wild-type SNCA gene, a mutant SNCA gene, or a transgenic SNCA gene in the context of a genetically manipulated cell, group of cells, or organism.

[0599] “Inhibiting expression of a SNCA gene” includes any level of inhibition of a SNCA gene, e.g., at least partial suppression of the expression of a SNCA gene, such as an inhibition by at least 20%. In certain embodiments, inhibition is by at least 30%, at least 40%, optionally at least 50%, at least about 60%, at least 70%, at least about 80%, at least 85%, at least 90%, at least 95%, at least 96%, at least 97%, at least 98%, or at least 99%; or to below the level of detection of the assay method.

[0600] The expression of a SNCA gene may be assessed based on the level of any variable associated with SNCA gene expression, e.g., SNCA mRNA level or SNCA protein level, or, for example, the level of neuroinflammation, e.g., microglial and astrocyte activation, and SNCA deposition in areas of the brain associated with neuronal cell death and/or levels of SNCA mRNA/protein within exosomes (neuronal or otherwise).

[0601] Inhibition may be assessed by a decrease in an absolute or relative level of one or more of these variables compared with a control level. The control level may be any type of control level that is utilized in the art, e.g., a pre-dose baseline level, or a level determined from a similar subject, cell, or sample that is untreated or treated with a control (such as, e.g., buffer only control or inactive agent control).

[0602] In some embodiments of the methods of the disclosure, expression of a SNCA gene is inhibited by at least 20%, 30%, 40%, optionally at least 50%, 60%, 70%, 80%, 85%, 90%, or 95%, or to below the level of detection of the assay. In certain embodiments, the methods include a clinically relevant inhibition of expression of SNCA, e.g., as demonstrated by a clinically relevant outcome after treatment of a subject with an agent to reduce the expression of SNCA.

[0603] Inhibition of the expression of a SNCA gene may be manifested by a reduction of the amount of mRNA expressed by a first cell or group of cells (such cells may be present, for example, in a sample derived from a subject) in which a SNCA gene is transcribed and which has or have been treated (e.g., by contacting the cell or cells with an RNAi agent of the disclosure, or by administering an RNAi agent of the disclosure to a subject in which the cells are or were present) such that the expression of a SNCA gene is inhibited, as compared to a second cell or group of cells substantially identical to the first cell or group of cells but which has not or have not been so treated (control cell(s) not treated with an RNAi agent or not treated with an RNAi agent targeted to the gene of interest). The degree of inhibition may be expressed in terms of:

$$\frac{( mRNA in control cells ) - ( mRNA in treated cells )}{( mRNA in control cells )} \cdot 100 \%$$

[0604] In other embodiments, inhibition of the expression of a SNCA gene may be assessed in terms of a reduction of a parameter that is functionally linked to a SNCA gene expression, e.g., SNCA protein expression. SNCA gene silencing may be determined in any cell expressing SNCA, either endogenous or heterologous from an expression construct, and by any assay known in the art.

[0605] Inhibition of the expression of a SNCA protein may be manifested by a reduction in the level of the SNCA protein that is expressed by a cell or group of cells (e.g., the level of protein expressed in a sample derived from a subject). As explained above, for the assessment of mRNA suppression, the inhibition of protein expression levels in a treated cell or group of cells may similarly be expressed as a percentage of the level of protein in a control cell or group of cells.

[0606] A control cell or group of cells that may be used to assess the inhibition of the expression of a SNCA gene includes a cell or group of cells that has not yet been contacted with an RNAi agent of the disclosure. For example, the control cell or group of cells may be derived from an individual subject (e.g., a human or animal subject) prior to treatment of the subject with an RNAi agent.

[0607] The level of SNCA mRNA that is expressed by a cell or group of cells may be determined using any method known in the art for assessing mRNA expression. In one embodiment, the level of expression of SNCA in a sample is determined by detecting a transcribed polynucleotide, or portion thereof, e.g., mRNA of the SNCA gene. RNA may be extracted from cells using RNA extraction techniques including, for example, using acid phenol/guanidine isothiocyanate extraction (RNAzol B; Biogenesis), RNeasy™ RNA preparation kits (Qiagen®) or PAXgene (PreAnalytix, Switzerland). Typical assay formats utilizing ribonucleic acid hybridization include nuclear run-on assays, RT-PCR, RNase protection assays, northern blotting, in situ hybridization, and microarray analysis. Circulating SNCA mRNA may be detected using methods the described in WO2012/177906, the entire contents of which are hereby incorporated herein by reference.

[0608] In some embodiments, the level of expression of SNCA is determined using a nucleic acid probe. The term “probe”, as used herein, refers to any molecule that is capable of selectively binding to a specific SNCA nucleic acid or protein, or fragment thereof. Probes can be synthesized by one of skill in the art, or derived from appropriate biological preparations. Probes may be specifically designed to be labeled. Examples of molecules that can be utilized as probes include, but are not limited to, RNA, DNA, proteins, antibodies, and organic molecules.

[0609] Isolated mRNA can be used in hybridization or amplification assays that include, but are not limited to, Southern or northern analyses, polymerase chain reaction (PCR) analyses and probe arrays. One method for the determination of mRNA levels involves contacting the isolated mRNA with a nucleic acid molecule (probe) that can hybridize to SNCA mRNA. In one embodiment, the mRNA is immobilized on a solid surface and contacted with a probe, for example by running the isolated mRNA on an agarose gel and transferring the mRNA from the gel to a membrane, such as nitrocellulose. In an alternative embodiment, the probe(s) are immobilized on a solid surface and the mRNA is contacted with the probe(s), for example, in an Affymetrix® gene chip array. A skilled artisan can readily adapt known mRNA detection methods for use in determining the level of SNCA mRNA.

[0610] An alternative method for determining the level of expression of SNCA in a sample involves the process of nucleic acid amplification or reverse transcriptase (to prepare cDNA) of for example mRNA in the sample, e.g., by RT-PCR (the experimental embodiment set forth in Mullis, 1987, U.S. Pat. No. 4,683,202), ligase chain reaction (Barany (1991) Proc. Natl. Acad. Sci. USA 88: 189-193), self-sustained sequence replication (Guatelli et al. (1990) Proc. Natl. Acad. Sci. USA 87: 1874-1878), transcriptional amplification system (Kwoh et al. (1989) Proc. Natl. Acad. Sci. USA 86: 1173-1177), Q-Beta Replicase (Lizardi et al. (1988) Bio/Technology 6: 1197), rolling circle replication (Lizardi et al., U.S. Pat. No. 5,854,033) or any other nucleic acid amplification method, followed by the detection of the amplified molecules using techniques well known to those of skill in the art. These detection schemes are especially useful for the detection of nucleic acid molecules if such molecules are present in very low numbers. In particular aspects of the disclosure, the level of expression of SNCA is determined by quantitative fluorogenic RT-PCR (i.e., the TaqMan™ System), by a Dual-Glo® Luciferase assay, or by other art-recognized method for measurement of SNCA expression or mRNA level.

[0611] The expression level of SNCA mRNA may be monitored using a membrane blot (such as used in hybridization analysis such as northern, Southern, dot, and the like), or microwells, sample tubes, gels, beads or fibers (or any solid support comprising bound nucleic acids). See U.S. Pat. Nos. 5,770,722, 5,874,219, 5,744,305, 5,677,195 and 5,445,934, which are incorporated herein by reference. The determination of SNCA expression level may also comprise using nucleic acid probes in solution.

[0612] In some embodiments, the level of mRNA expression is assessed using branched DNA (bDNA) assays or real time PCR (qPCR). The use of this PCR method is described and exemplified in the Examples presented herein. Such methods can also be used for the detection of SNCA nucleic acids.

[0613] The level of SNCA protein expression may be determined using any method known in the art for the measurement of protein levels. Such methods include, for example, electrophoresis, capillary electrophoresis, high performance liquid chromatography (HPLC), thin layer chromatography (TLC), hyperdiffusion chromatography, fluid or gel precipitin reactions, absorption spectroscopy, a colorimetric assays, spectrophotometric assays, flow cytometry, immunodiffusion (single or double), immunoelectrophoresis, western blotting, radioimmunoassay (RIA), enzyme-linked immunosorbent assays (ELISAs), immunofluorescent assays, electrochemiluminescence assays, and the like. Such assays can also be used for the detection of proteins indicative of the presence or replication of SNCA proteins.

[0614] In some embodiments, the efficacy of the methods of the disclosure in the treatment of a SNCA-related disease is assessed by a decrease in SNCA mRNA level (e.g, by assessment of a CSF sample for SNCA level, by brain biopsy, or otherwise).

[0615] In some embodiments of the methods of the disclosure, the RNAi agent is administered to a subject such that the RNAi agent is delivered to a specific site within the subject. The inhibition of expression of SNCA may be assessed using measurements of the level or change in the level of SNCA mRNA or SNCA protein in a sample derived from a specific site within the subject, e.g., CNS cells. In certain embodiments, the methods include a clinically relevant inhibition of expression of SNCA, e.g. as demonstrated by a clinically relevant outcome after treatment of a subject with an agent to reduce the expression of SNCA.

[0616] As used herein, the terms detecting or determining a level of an analyte are understood to mean performing the steps to determine if a material, e.g., protein, RNA, is present. As used herein, methods of detecting or determining include detection or determination of an analyte level that is below the level of detection for the method used.

### IX. Methods of Treating or Preventing SNCA-Associated Neurodegenerative Diseases

[0617] The present disclosure also provides methods of using an RNAi agent of the disclosure or a composition containing an RNAi agent of the disclosure to reduce or inhibit SNCA expression in a cell. The methods include contacting the cell with a dsRNA of the disclosure and maintaining the cell for a time sufficient to obtain degradation of the mRNA transcript of a SNCA gene, thereby inhibiting expression of the SNCA gene in the cell. Reduction in gene expression can be assessed by any methods known in the art. For example, a reduction in the expression of SNCA may be determined by determining the mRNA expression level of SNCA using methods routine to one of ordinary skill in the art, e.g., northern blotting, qRT-PCR; by determining the protein level of SNCA using methods routine to one of ordinary skill in the art, such as western blotting, immunological techniques, and mass-spectrometry.

[0618] In the methods of the disclosure the cell may be contacted in vitro or in vivo, i.e., the cell may be within a subject.

[0619] A cell suitable for treatment using the methods of the disclosure may be any cell that expresses a SNCA gene. A cell suitable for use in the methods of the disclosure may be a mammalian cell, e.g., a primate cell (such as a human cell or a non-human primate cell, e.g., a monkey cell or a chimpanzee cell), a non-primate cell (such as a a rat cell, or a mouse cell. In one embodiment, the cell is a human cell, e.g., a human CNS cell.

[0620] In certain embodiments, SNCA expression is inhibited in the cell by at least about 30, 40, 50, 55, 60, 65, 70, 75, 80, 85, 90, 95, 96, 97, 98, 99, or about 100%, i.e., to below the level of detection. In preferred embodiments, SNCA expression is inhibited by at least 50%.

[0621] The in vivo methods of the disclosure may include administering to a subject a composition containing an RNAi agent, where the RNAi agent includes a nucleotide sequence that is complementary to at least a part of an RNA transcript of the SNCA gene of the mammal to be treated. When the organism to be treated is a mammal such as a human, the composition can be administered by any means known in the art including, but not limited to CNS-directed and/or intracranial (e.g., intraventricular, intraparenchymal, and intrathecal), oral, intraperitoneal, or other parenteral routes, including, intravenous, intramuscular, intravitreal, subcutaneous, transdermal, airway (aerosol), nasal, rectal, and topical (including buccal and sublingual) administration. In certain embodiments, the compositions are administered by intrathecal infusion or injection.

[0622] In some embodiments, the administration is via a depot injection. A depot injection may release the RNAi agent in a consistent way over a prolonged time period. Thus, a depot injection may reduce the frequency of dosing needed to obtain a desired effect, e.g., a desired inhibition of SNCA, or a therapeutic or prophylactic effect. A depot injection may also provide more consistent serum concentrations. Depot injections may include intrathecal injections, subcutaneous injections or intramuscular injections.

[0623] In some embodiments, the administration is via a pump. The pump may be an external pump or a surgically implanted pump. In certain embodiments, the pump is a subcutaneously implanted osmotic pump. In other embodiments, the pump is an infusion pump. An infusion pump may be used for intracranial, intravenous, subcutaneous, arterial, or epidural infusions. In preferred embodiments, the infusion pump is a surgically implanted pump that delivers the RNAi agent to the CNS.

[0624] The mode of administration may be chosen based upon whether local or systemic treatment is desired and based upon the area to be treated. The route and site of administration may be chosen to enhance targeting.

[0625] In one aspect, the present disclosure also provides methods for inhibiting the expression of a SNCA gene in a mammal. The methods include administering to the mammal a composition comprising a dsRNA that targets a SNCA gene in a cell of the mammal and maintaining the mammal for a time sufficient to obtain degradation of the mRNA transcript of the SNCA gene, thereby inhibiting expression of the SNCA gene in the cell. Reduction in gene expression can be assessed by any methods known it the art and by methods, e.g. qRT-PCR, described herein. Reduction in protein production can be assessed by any methods known it the art and by methods, e.g. ELISA, described herein. In one embodiment, a CNS biopsy sample or a cerebrospinal fluid (CSF) sample serves as the tissue material for monitoring the reduction in SNCA gene or protein expression (or of a proxy therefore).

[0626] The present disclosure further provides methods of treatment of a subject in need thereof. The treatment methods of the disclosure include administering an RNAi agent of the disclosure to a subject, e.g., a subject that would benefit from inhibition of SNCA expression, in a therapeutically effective amount of an RNAi agent targeting a SNCA gene or a pharmaceutical composition comprising an RNAi agent targeting a SNCA gene.

[0627] In addition, the present disclosure provides methods of preventing, treating or inhibiting the progression of a SNCA-associated neurodegenerative disease or disorder, such as a synucleinopathy, such as PD, multiple system atrophy, Lewy body dementia (LBD), pure autonomic failure (PAF), Pick's disease, progressive supranuclear palsy, dementia pugilistica, parkinsonism linked to chromosome 17, Lytico-Bodig disease, tangle predominant dementia, Argyrophilic grain disease, ganglioglioma, gangliocytoma, meningioangiomatosis, subacute sclerosing panencephalitis, lead encephalopathy, tuberous sclerosis, Hallervorden-Spatz disease, lipofuscinosis, corticobasal degeneration, frontotemporal dementia, frontotemporal lobar degeneration, Alzheimer's disease, Huntington's disease, Down's syndrome, psychosis, schizophrenia and Creutzfeldt-Jakob disease.

[0628] The methods include administering to the subject a therapeutically effective amount of any of the RNAi agent, e.g., dsRNA agents, or the pharmaceutical composition provided herein, thereby preventing, treating or inhibiting the progression of the SNCA-associated neurodegenerative disease or disorder in the subject.

[0629] An RNAi agent of the disclosure may be administered as a “free RNAi agent.” A free RNAi agent is administered in the absence of a pharmaceutical composition. The naked RNAi agent may be in a suitable buffer solution. The buffer solution may comprise acetate, citrate, prolamine, carbonate, or phosphate, or any combination thereof. In one embodiment, the buffer solution is phosphate buffered saline (PBS). The pH and osmolarity of the buffer solution containing the RNAi agent can be adjusted such that it is suitable for administering to a subject.

[0630] Alternatively, an RNAi agent of the disclosure may be administered as a pharmaceutical composition, such as a dsRNA liposomal formulation.

[0631] Subjects that would benefit from a reduction or inhibition of SNCA gene expression are those having a SNCA-associated neurodegenerative disease.

[0632] The disclosure further provides methods for the use of an RNAi agent or a pharmaceutical composition thereof, e.g., for treating a subject that would benefit from reduction or inhibition of SNCA expression, e.g., a subject having a SNCA-associated neurodegenerative disorder, in combination with other pharmaceuticals or other therapeutic methods, e.g., with known pharmaceuticals or known therapeutic methods, such as, for example, those which are currently employed for treating these disorders. For example, in certain embodiments, an RNAi agent targeting SNCA is administered in combination with, e.g., an agent useful in treating a SNCA-associated neurodegenerative disorder as described elsewhere herein or as otherwise known in the art. For example, additional agents and treatments suitable for treating a subject that would benefit from reduction in SNCA expression, e.g., a subject having a SNCA-associated neurodegenerative disorder, may include agents currently used to treat symptoms of SNCA. The RNAi agent and additional therapeutic agents may be administered at the same time or in the same combination, e.g., intrathecally, or the additional therapeutic agent can be administered as part of a separate composition or at separate times or by another method known in the art or described herein.

[0633] Exemplary additional therapeutics and treatments include dopamine-modulating agents, among others, for example, carbidopa-levodopa, levodopa, entacopone, toicapone, opicapone, pramipexole. ropinirole, apomorphine, rotigotine, selegiline, rasagiline, safinamide, amantadine, istradefylline, trihexyphenidyl, benztropine, rivastigmine, donepezil, galantamine and memantine, as well as physical, occupational and speech therapy, an exercise program including cardiorespiratory, resistance, flexibility, and gait and balance exercises, and deep brain stimulation (DBS) involving the implantation of an electrode into a targeted area of the brain.

[0634] In one embodiment, the method includes administering a composition featured herein such that expression of the target SNCA gene is decreased, for at least one month. In certain embodiments, expression is decreased for at least 2 months, 3 months, or 6 months.

[0635] Optionally, the RNAi agents useful for the methods and compositions featured herein specifically target RNAs (primary or processed) of the target SNCA gene. Compositions and methods for inhibiting the expression of these genes using RNAi agents can be prepared and performed as described herein.

[0636] Administration of the dsRNA according to the methods of the disclosure may result in a reduction of the severity, signs, symptoms, or markers of such diseases or disorders in a patient with a SNCA-associated neurodegenerative disorder. By “reduction” in this context is meant a statistically significant or clinically significant decrease in such level. The reduction can be, for example, at least 5%, 10%, 15%, 20%, 25%, 30%, 35%, 40%, 45%, 50%, 55%, 60%, 65%, 70%, 75%, 80%, 85%, 90%, 95%, or about 100%.

[0637] Efficacy of treatment or prevention of disease can be assessed, for example by measuring disease progression, disease remission, symptom severity, reduction in pain, quality of life, dose of a medication required to sustain a treatment effect, level of a disease marker or any other measurable parameter appropriate for a given disease being treated or targeted for prevention. It is well within the ability of one skilled in the art to monitor efficacy of treatment or prevention by measuring any one of such parameters, or any combination of parameters. For example, efficacy of treatment of a SNCA-associated neurodegenerative disorder may be assessed, for example, by periodic monitoring of a subject's cognition, learning, or memory. Comparisons of the later readings with the initial readings provide a physician an indication of whether the treatment is effective. It is well within the ability of one skilled in the art to monitor efficacy of treatment or prevention by measuring any one of such parameters, or any combination of parameters. In connection with the administration of an RNAi agent targeting SNCA or pharmaceutical composition thereof, “effective against” a SNCA-associated neurodegenerative disorder indicates that administration in a clinically appropriate manner results in a beneficial effect for at least a statistically significant fraction of patients, such as an improvement of symptoms, a cure, a reduction in disease, extension of life, improvement in quality of life, or other effect generally recognized as positive by medical doctors familiar with treating SNCA-associated neurodegenerative disorders and the related causes.

[0638] A treatment or preventive effect is evident when there is a statistically significant improvement in one or more parameters of disease status, or by a failure to worsen or to develop symptoms where they would otherwise be anticipated. As an example, a favorable change of at least 10% in a measurable parameter of disease, and optionally at least 20%, 30%, 40%, 50% or more can be indicative of effective treatment. Efficacy for a given RNAi agent drug or formulation of that drug can also be judged using an experimental animal model for the given disease as known in the art. When using an experimental animal model, efficacy of treatment is evidenced when a statistically significant reduction in a marker or symptom is observed.

[0639] Alternatively, the efficacy can be measured by a reduction in the severity of disease as determined by one skilled in the art of diagnosis based on a clinically accepted disease severity grading scale. Any positive change resulting in e.g., lessening of severity of disease measured using the appropriate scale, represents adequate treatment using an RNAi agent or RNAi agent formulation as described herein.

[0640] Subjects can be administered a therapeutic amount of dsRNA, such as about 0.01 mg/kg to about 200 mg/kg.

[0641] The RNAi agent can be administered intrathecally, via intravitreal injection, or by intravenous infusion over a period of time, on a regular basis. In certain embodiments, after an initial treatment regimen, the treatments can be administered on a less frequent basis. Administration of the RNAi agent can reduce SNCA levels, e.g., in a cell, tissue, blood, CSF sample or other compartment of the patient by at least 20%, 30%, 40%, 50%, 55%, 60%, 65%, 70,% 75%, 80%, 85%, 90%, 95%, 96%, 97%, 98%, or at least about 99% or more. In a preferred embodiment, administration of the RNAi agent can reduce SNCA levels, e.g., in a cell, tissue, blood, CSF sample or other compartment of the patient by at least 50%.

[0642] Before administration of a full dose of the RNAi agent, patients can be administered a smaller dose, such as a 5% infusion reaction, and monitored for adverse effects, such as an allergic reaction. In another example, the patient can be monitored for unwanted immunostimulatory effects, such as increased cytokine (e.g., TNF-alpha or INF-alpha) levels.

[0643] One or more injections may be used to deliver the desired, e.g., monthly dose of RNAi agent to a subject. The injections may be repeated over a period of time. The administration may be repeated on a regular basis. In certain embodiments, after an initial treatment regimen, the treatments can be administered on a less frequent basis. A repeat-dose regimine may include administration of a therapeutic amount of RNAi agent on a regular basis, such as monthly or extending to once a quarter, twice per year, once per year. In certain embodiments, the RNAi agent is administered about once per month to about once per quarter (i.e., about once every three months).

[0644] Unless otherwise defined, all technical and scientific terms used herein have the same meaning as commonly understood by one of ordinary skill in the art to which this invention belongs. Although methods and materials similar or equivalent to those described herein can be used in the practice or testing of the RNAi agents and methods featured in the invention, suitable methods and materials are described below. All publications, patent applications, patents, and other references mentioned herein are incorporated by reference in their entirety. In case of conflict, the present specification, including definitions, will control. In addition, the materials, methods, and examples are illustrative only and not intended to be limiting.

[0645] An informal Sequence Listing is also filed herewith and forms part of the specification as filed.

### EXAMPLES

### Example 1: Materials and Methods

### Bioinformatics

[0646] A set of siRNAs targeting the human Synuclein alpha gene (SNCA; human NCBI refseq ID NM_007308.3; NCBI GeneID: 6622; SEQ ID NO: 1) as well the toxicology-species SNCA (XM_005555422.2; SEQ ID NO: 3) ortholog from cynomolgus monkey were designed using custom R and Python scripts. All the siRNAs were designed to have a perfect match to the human SNCA transcripts and a subset either perfect or near-perfect matches to the cynomolgus monkey ortholog. The human SNCA NM_007308 REFSEQ mRNA, version 3 (SEQ ID NO: 1), has a length of 3312 bases. The rationale and method for the set of siRNA designs follows. The predicted efficacy for every potential 23mer siRNA from position 10 through the end was determined with a random forest model derived from the direct measure of mRNA knockdown from several thousand distinct siRNA designs targeting a diverse set of vertebrate genes. For each strand of the siRNA, a custom Python script was used in a brute force search to measure the number and positions of mismatches between the siRNA and all potential alignments in the human transcriptome. Extra weight was given to mismatches in the seed region, defined here as positions 2-9 of the antisense oligonucleotide, as well the cleavage site of the siRNA, defined here as positions 10-11 of the antisense oligonucleotide. The relative weight of the mismatches was 2.8, 1.2, 1 for seed mismatches, cleavage site, and other positions up through antisense position 19. Mismatches in the first position were ignored. A specificity score was calculated for each strand by summing the value of each weighted mismatch. Preference was given to siRNAs whose antisense score in human and cynomolgus monkey was >=2 and predicted efficacy was >=50% knockdown.

### In Vitro Screening—Dual-Glo® Luciferase Assay

[0647] Cos-7 cells (ATCC, Manassas, VA) were grown to near confluence at 37° C. in an atmosphere of 5% CO₂ in DMEM (ATCC) supplemented with 10% FBS, before being released from the plate by trypsinization. Multi-dose experiments were performed at 10 nM and 0.1 nM. siRNA and psiCHECK2-SNCAs (human NM_007308 and mouse NM_009221) plasmid transfections were carried out with plasmids containing the 3′ untranslated region (UTR). Transfection was carried out by adding 5 μL of siRNA duplexes and 5 μL (5 ng) of psiCHECK2 plasmid per well along with 4.9 μL of Opti-MEM plus 0.1 μL of Lipofectamine™ 2000 per well (Invitrogen, Carlsbad CA. cat #13778-150) and then incubated at room temperature for 15 minutes. The mixture was then added to the cells which were re-suspended in 35 μL of fresh complete media. The transfected cells were incubated at 37° C. in an atmosphere of 5% CO₂.

[0648] Forty-eight hours after the siRNAs and psiCHECK2 plasmid were transfected, Firefly (transfection control) and Renilla (fused to SNCA target sequence) luciferase were measured. First, media was removed from cells. Then Firefly luciferase activity was measured by adding a mixture of 20 μL Dual-Glo® Luciferase Reagent and 20 μL DMEM to each well. The mixture was incubated at room temperature for 30 minutes before luminescense (500 nm) was measured on a Spectramax (Molecular Devices) to detect the Firefly luciferase signal. Renilla luciferase activity was measured by adding a mixture of 20 μL of room temperature of Dual-Glo® Stop & Glo® Buffer and 0.1 μL Dual-Glo® Stop & Glo® Substrate to each well and the plates were incubated for 10-15 minutes before luminescence was again measured to determine the Renilla luciferase signal. The Dual-Glo® Stop & Glo® mixture quenches the firefly luciferase signal and sustained luminescence for the Renilla luciferase reaction. siRNA activity was determined by normalizing the Renilla (SNCA) signal to the Firefly (control) signal within each well. The magnitude of siRNA activity was then assessed relative to cells that were transfected with the same vector but were not treated with siRNA or were treated with a non-targeting siRNA. All transfections were done with n=4.

### In Vitro Screening—Cell Culture and Transfections

[0649] Cells were transfected by adding 4.9 μL of Opti-MEM plus 0.1 μL of RNAiMAX per well (Invitrogen, Carlsbad CA. cat #13778-150) to 5 μL of siRNA duplexes per well, with 4 replicates of each siRNA duplex, into a 384-well plate, and incubated at room temperature for 15 minutes. 40 μL of MEDIA containing ˜5×10³ cells were then added to the siRNA mixture. Cells were incubated for 24 hours prior to RNA purification. Experiments were performed at 10 nM, 1 nM and 0.1 nM. Transfection experiments were performed in human hepatoma Hep3B cells (ATCC HB-8064) with EMEM (ATCC catalog no. 30-2003), mouse neuroblastoma Neuro-2A cells (ATCC CCL-131) with EMEM media, and human neuroblastoma BE(2)-C, HeLa, and B16-F10 cells. BE(2)-C cells (ATCC CRL-2268) were grown in EMEM:F12 media (Gibco catalog no. 11765054). HeLa cells and B16-F10 cells were grown according to standard protocols.

In Vitro Screening—cDNA Synthesis Using ABI High Capacity cDNA Reverse Transcription Kit (Applied Biosystems, Foster City, CA, Cat #4368813)

[0650] 12 μL of a master mix containing 1.2 μL 10× Buffer, 0.48 μL 25×dNTPs, 1.2 μL 10× Random primers, 0.6 μL Reverse Transcriptase, 0.6 μL RNase inhibitor and 7.92 μL of H2O per reaction was added to the bead bound RNA isolated above. Plates were sealed, mixed, and incubated on an electromagnetic shaker for 10 minutes at room temperature, followed by 2h incubation at 37° C. Branched DNA assays were also performed using the aforementioned protocol.

### In Vitro Screening—Real Time PCR

[0651] 2 μL of cDNA were added to a master mix containing 0.5 μL of human or mouse GAPDH TaqMan Probe (ThermoFisher cat 4352934E or 4351309) and 0.5 μL of appropriate SNCA probe (Thermo Fisher Taqman human: Hs00268077, mouse: Mm00485946) and 5 μL Lightcycler 480 probe master mix (Roche Cat #04887301001) per well in a 384 well plates (Roche cat #04887301001). Real time PCR was done in a LightCycler480 Real Time PCR system (Roche). Each duplex was tested with N=4 and data were normalized to cells transfected with a non-targeting control siRNA. To calculate relative fold change, real time data were analyzed using the ΔΔCt method and normalized to assays performed with cells transfected with a non-targeting control siRNA.

### Example 2: Identification of Potent Candidate siRNAs to Adapt for CNS-Directed Use

[0652] In vitro and in vivo screening for active SNCA-targeting siRNAs (duplexes) was performed previously, and identified a number of knockdown “hot spots” in the SNCA gene (mRNA target). 356 duplexes were initially subjected to in vitro screening, across various cell types, including human BE(2)-C neuroblastoma cells, human HeLa epithelial cells, B16-F10 mouse epithelial cells, and in a dual luciferase reporter system in COS-7 African green monkey fibroblast-like cells. Exemplary 3′UTR SNCA-targeting RNAi agents AD-464778, AD-464782, AD-464694, AD-464634, AD-464779, and coding sequence (CDs) SNCA-targeting RNAi agents AD-464314, AD-464313, AD-464590, AD-464585, AD-464229, AD-464586, and AD-464592 were assessed in BE(2)-C cells and in the COS-7 cell dual luciferase reporter system, respectively, at 10 nM concentration (FIG. 1A), with all such duplexes showing significant knockdown in at least one in vitro system (e.g., >50% SNCA mRNA reduction). A majority of potent duplexes for SNCA knockdown were observed to occur in the 3′UTR region. The 12 indicated duplexes (3′UTR-targeting siRNAs: AD-464778, AD-464782, AD-464694, AD-464634, AD-464779; coding sequence-targeting siRNAs: AD-464314, AD-464313, AD-464590, AD-464585, AD-464229, AD-464586, and AD-464592) were then assayed in human SNCA-AAV over-expressing mice for liver SNCA knockdown. Robust in vivo knockdown of liver SNCA levels was observed for various tested siRNAs, including all 3′UTR-targeting duplexes (AD-464778, AD-464782, AD-464694, AD-464634 and AD-464779) and particularly for coding sequence-targeting AD-464314 and AD-464229 duplexes (FIG. 1B). In vitro cell line screening and in vivo liver AAV mouse liver data were observed to be well correlated.

[0653] The top 40 most potent SNCA-targeting siRNAs were identified from in vitro hot spot and structure activity relationship (SAR) assessments, which were performed for each tested liver-directed (GalNAc-modified) duplex across a concentration range of 0.1 nM, 1 nM and 10 nM, and RNAseq assessments were also performed upon SNCA-targeting duplexes, in identifying a select number of SNCA-targeting siRNAs to move forward for further in vivo assessment and adaptation to CNS-targeting siRNAs (including siRNAs of the instant disclosure). Specifically, SNCA-targeting siRNAs AD-1548851.1, AD-1548854.1, AD-1548869.1, AD-1548870.1, AD-1548884.1, AD-1548886.1, AD-1549052.1, AD-1549054.1, AD-1549245.1, AD-1549266.1, AD-1549267.1, AD-1549269.1, AD-1549272.1, AD-1549283.1, AD-1549284.1, AD-1549285.1, AD-1549290.1, AD-1549333.1, AD-1549334.1, AD-1549351.1, AD-1549354.1, AD-1549357.1, AD-1549359.1, AD-1549397.1, AD-1549401.1, AD-1549403.1, AD-1549406.1, AD-1549407.1, AD-1549439.1, AD-1549518.1, AD-1549525.1, AD-1549628.1, AD-1549641.1, AD-1571164.1, AD-1571187.1, AD-1571188.1, AD-1571191.1, AD-1571193.1, AD-1571194.1 and AD-1571262.1 were the forty duplexes identified as the most potent (FIG. 2) when selecting those duplexes that exhibited the highest knockdown level at 0.1 nM and that displayed a clear linear dose response.

[0654] Only two duplexes tested (AD-1549525.1 and AD-1549628.1) exhibited significant off-target effects, i.e., off-target gene changes that exceeded log two-fold changes.

[0655] Based upon the above results, 17 duplexes were selected for further evaluation for in vivo use (including administration via AAV to model mice). Five of the selected duplexes (AD-1549052.1, AD1549054.1, AD-1548886.1, AD-1548884.1, and AD-1549245.1) targeted coding sequences (CDs) in SNCA, while the remaining 12 selected duplexes (AD-1549359.1, AD-1549333.1, AD-1549407.1, AD-1548854.1, AD-1549283.1, AD-1549267.1, AD-1548869.1, AD-1571164.1, AD-1549354.1, AD-1571188.1, AD-1549401.1, and AD-1549290.1) targeted UTR sequences in SNCA. Among the selected duplexes was the UTR-targeting duplex AD-1549290.1 (FIG. 3).

### Example 3: In Vivo Evaluation of Candidate SNCA-Targeting RNAi Agents Identified Three Candidate Lead Compounds for Adaptation to CNS-Directed Use

[0656] The initial 17 selected duplexes were evaluated in an in vivo study in which human SNCA was administered via adeno-associated virus (AAV) and expressed in mice for seven days prior to administration of a SNCA-targeting siRNA. Knockdown was assessed at seven to 14 days post-siRNA administration (10 days was identified as most optimal for siRNA knockdown). Human SNCA expression by AAV in mouse liver was first verified (FIG. 4, at left, in which cycle threshold was used to detect AAV-mediated expression of SNCA in mouse liver at days 7, 14 and 21 in a dose-responsive manner). Previously described SNCA-targeting duplexes AD-464634 (3′ UTR-targeting) and AD-464314 (coding sequence-targeting) were each identified to exhibit robust SNCA knockdown at both 7 day and 14 day timepoints, at both 3 mpk and 10 mpk amounts assessed (FIG. 4, at right). Testing of the 17 selected duplexes for in vivo SNCA knockdown in liver tissue of hSNCA AAV transfected mice was then performed and revealed robust hSNCA knockdown in vivo by a majority of the tested duplexes (FIG. 5A). In particular, duplexes AD-1549052.3 (CD-targeting), AD-1549359.3 (UTR-targeting), AD-1549054.3 (CD-targeting), AD-1549333.3 (UTR-targeting), AD-1746467.2 (UTR-targeting, having sense strand oligonucleotide A-3227795 5′-gscsagugauUfGfAfagua(Uhd)cuguaL96-3′ (SEQ ID NO: 263), antisense strand oligonucleotide A-2861991 5′-VPusdAscadGadTacuudCaAfucacugcsusg-3′ (SEQ ID NO: 264), corresponding unmodified sense strand oligonucleotide 5′-GCAGUGAUUGAAGUAUCUGUA-3′ (SEQ ID NO: 265), and corresponding unmodified antisense strand oligonucleotide sequence 5′-UACAGATACUUCAAUCACUGCUG-3′ (SEQ ID NO: 266), where a CNS-directed duplex has sense strand oligonucleotide 5′-gscsagugauUfGfAfagua(Uhd)cugsusa-3′ (SEQ ID NO: 267) and antisense strand oligonucleotide SEQ ID NO: 264), AD-1746465.2 (UTR-targeting), AD-1571188.3 (UTR-targeting), AD-1549401.3 (UTR-targeting), AD-1548886.3 (CD-targeting), and AD-1746466.2 (UTR-targeting) each exhibited robust hSNCA knockdown in liver tissue of hSNCA AAV-transfected mice. Seven of these siRNAs, AD-1549054.3, AD-1549333.3, AD-1746465.2, AD-1571188.3, AD-1549401.3, AD-1548886.3, and AD-1746466.2, were selected for further evaluation. Each of these duplexes harbored both GalNAc and C16 modifications (FIG. 5B) in the liver-tested forms; however, removal of the GalNAc moieties was contemplated for adaptation of these duplexes for CNS targeting.

[0657] Additional review of in vivo SNCA knockdown, in vitro SNCA knockdown, and RNAseq results resulted in selection of a preferred set of three SNCA-targeting siRNAs—AD-1549333 (3′ UTR-targeting), AD-1746465 (3′ UTR-targeting), and AD-1549054 (CD-targeting)—for further in vivo evaluation, including non-human primate (NHP) studies (FIG. 6A). This selection included one coding-sequence-targeting anti-SNCA siRNA and two UTR-targeting siRNAs (FIG. 6B), each of which exhibited high in vivo knockdown activity at 3 mg/kg administration and that included C16 modification at either position 6 or position 16 of the antisense strand (a chemistry that prior studies had de-risked; FIG. 6C). These three duplexes—AD-1549333, AD-1746465, and AD-1549054—were respectively adapted for CNS-directed delivery, by removal of the 3′-terminal triantennary GalNAc from the sense strand and inclusion of two additional phosphorothioate modifications, located at the ultimate and penultimate inter-nucleotide linkages of the 3′ end of the sense strand, as shown in Table 2 for resulting lead duplexes AD-1747585 (having parent duplex AD-1549333), AD-1747583 (having parent duplex AD-1746465), and AD-1747580 (having parent duplex AD-1549054), respectively (FIG. 7).

### Example 4: Evaluation of Candidate Lead Compound Efficacy and Safety in Non-Human Primates (NHPs) Identified AD-1747580 as a Preferred Candidate Lead Duplex

[0658] Duplexes identified as the top three lead candidate CNS-directed SNCA-targeting siRNAs after rodent in vivo AAV screening—AD-1747580, AD-1747583, and AD-1747585—were selected for evaluation of pharmacokinetic (PK) and pharmacodynamic (PD) properties in non-human primates (NHPs), as well as assessment of any off-target effects and toxicity evaluation (refer to FIG. 8A for initial rodent in vivo knockdown data for selected duplexes, as well as the identities of the original, GalNAc-modified duplexes from which the currently selected three duplexes derived, further noting that these three original duplexes showed no significant off-target effects when assessed via RNA-Seq). For PK/PD studies of the three SNCA-targeting siRNAs, study design was partitioned into 29 day and 84 day time courses, performed upon parallel animal cohorts. For the 29 day study (designed to informed on duplex selection for a toxicity evaluation group), three control animals were dosed with artificial cerebrospinal fluid (aCSF), while a second group of animals (n=5) was administered a single 60 mg dose of the first lead candidate siRNA (AD-1747580), a third group of animals (n=5) was administered a single 60 mg dose of the second lead candidate siRNA (AD-1747583), and a fourth group of animals (n=5) was administered a single 60 mg dose of the third lead candidate siRNA (AD-1747585). Similarly, for the parallel study terminating at day 84 (designed to evaluation duration), another group (group 5) of three control animals was dosed with artificial cerebrospinal fluid (aCSF), while a sixth group of animals (n=5) was administered a single 60 mg dose of the first lead candidate siRNA (AD-1747580), a seventh group of animals (n=5) was administered a single 60 mg dose of the second lead candidate siRNA (AD-1747583), and an eighth group of animals (n=5) was administered a single 60 mg dose of the third lead candidate siRNA (AD-1747585).

[0659] Serial cerebrospinal fluid (CSF) and plasma samples were collected from NHPs of each group for biomarker analysis (including exosome evaluation). Tissues were also collected for the PK/PD studies, to evaluate mRNA and protein levels in each of the following: CNS tissues=cortex, midbrain, striatum, hippocampus, cerebellum, pons, and spinal cord (gating for cortex and midbrain according to development candidate (DC) selection criteria); kidney; liver; and heart.

[0660] In an initial observation at the time of injection of cohorts of day 29 experimental NHP animals, with each NHP animal dosed via intrathecal injection with a single 60 mg dose of siRNA, all three candidate lead SNCA-targeting duplexes examined showed similar pharmacokinetics across dosed animals for the immediate 24 hour period after dosing (FIG. 8B), consistent with reproducible dosing having occurred and reflective of platform stability.

[0661] When SNCA knockdown was examined at day 29 post-injection, pharmacodynamic (PD) effects of greater than 80% knockdown of SNCA mRNA levels in prefrontal cortex and greater than 60% knockdown of SNCA mRNA levels in midbrain were observed for each of the three candidate lead SNCA-targeting duplexes examined (FIG. 9A, left panel). For all three tested duplexes, the observed PD effects on SNCA mRNA levels in the NHPs correlated well with pharmacokinetic (PK) distribution of duplexes in examined tissues, as assessed by measurement of duplex tissue concentration. Duplex tissue concentration (PK) “dose”-tissue SNCA mRNA (PD) response curve IC₅₀ values of 1.050 μg/g, 0.532 μg/g, and 1.300 μg/g were calculated for AD-1747580, AD-1747583, and AD-1747585 duplexes, respectively (FIG. 9A, right panel). While the calculated differences in IC₅₀ values between these three duplexes were not statistically significant, the IC₅₀ value ranking of duplexes for target SNCA mRNA knockdown was noted as AD-1747583<AD-1747580<AD-1747585. α-synuclein protein levels were also significantly reduced in brain and spinal cord tissues of NHPs administered candidate lead duplexes AD-1747580, AD-1747583, and AD-1747585 (FIG. 9B, left panel). At day 29, the greatest α-synuclein protein knockdown was observed in the spinal cord (thoracic), consistent with the intrathecal dosing route. In brain tissues, greater α-synuclein protein knockdown was observed in the striatum, while tissue protein PK/PD plots were much more scattered for all three candidate lead duplexes (FIG. 9B, right panel) than were corresponding plots for SNCA mRNA knockdown (FIG. 9A, right panel). The preceding data (including FIG. 10 summary, which also displays schematic diagrams of AD-1747580, AD-1747583, and AD-1747585 duplexes) indicated that all three duplexes tested (AD-1747580, AD-1747583, and AD-1747585) exhibited similar α-synuclein knockdown potencies, consistent with both mouse AAV in vivo screen data and mRNA PK/PD curves for NHP administrations.

[0662] Cohorts of NHPs, each administered one of the three candidate lead compounds, were subsequently assessed at day 84 post-injection. At day 84, high potency SNCA mRNA knockdown was observed in both prefrontal cortex and midbrain for all three duplexes tested (AD-1747580, AD-1747583, and AD-1747585). Specifically, 80-90% or more knockdown of SNCA mRNA was observed in prefrontal cortex across all three duplexes at day 84 (FIG. 11, left panel). Consistent with results previously observed at day 29 post-administration, day 84 samples exhibited good correlation between tissue PK and tissue mRNA PD, with similar potencies observed for each of the three candidate lead duplexes examined (FIG. 11, right panel). Calculated IC₅₀ values of 0.985 μg/g, 0.239 μg/g, and 1.40 μg/g were measured for duplexes AD-1747580, AD-1747583, and AD-1747585, respectively. Notably, the AD-1747585-administered cohort only had one animal that met dosing criteria, which resulted in the remainder of the AD-1747585-administered cohort being re-dosed (six animals in total were re-dosed in this cohort, with only three re-dosed animals ultimately observed to have been well-dosed, noting that well-dosed criteria were established as animals in which siRNA concentration in CSF at 24 hours post-dose was observed to be >1000 ng/mL; any animals falling below 1000 ng/mL siRNA concentration in CSF at 24 hours post-dose in the day 84 cohorts were re-dosed).

[0663] Closer examination of distinct brain regions of dosed NHPs at day 84 revealed significant reduction of both SNCA mRNA (FIG. 12A) and α-Synuclein protein (FIG. 12B) levels at day 84 post-administration in different brain regions, with little differentiation observed between the three candidate leads tested (AD-1747580, AD-1747583, and AD-1747585 duplexes). SNCA mRNA was reduced in NHPs at day 84 after administration of 60 mg of duplex agent via the intrathecal route, with similar potencies observed between the three tested duplexes in various brain regions (prefrontal cortex, midbrain, hippocampus, medulla and pons, striatum caudate, and cerebellum) and in the spinal cord (thoracic spine) (FIG. 12A). The greatest levels of mRNA knockdown at day 84 were observed in the prefrontal cortex and hippocampus, consistent with the duplexes being distributed via the intrathecal route of administration upon the current platform. Specifically, >60% knockdown of SNCA mRNA was observed in the striatum and midbrain, with some well-dosed animals showing up to 90% knockdown in these deeper brain regions (FIG. 12A). α-Synuclein protein levels were also reduced at day 84 in the brain and spinal cord (with all of the following regions showing significant reductions in α-Synuclein protein levels: prefrontal cortex, midbrain, thoracic spine, hippocampus, medulla and pons, striatum caudate, and cerebellum; FIG. 12B), again with little differentiation observed between the three candidate lead duplexes. Notably, similar, robust α-Synuclein protein reduction was observed in the spinal cord (thoracic), prefrontal cortex, hippocampus and midbrain (FIG. 12B). Up to 75% reduction in α-Synuclein protein was also observed in the medulla pons and striatum caudate, for all three molecules. These data indicated that all 3 leads possessed similar potencies, as well as similar durability. α-Synuclein protein levels exhibited high correlation to SNCA mRNA levels across the different brain regions examined at day 84 (FIG. 12C), with R² values in excess of 0.9 for all brain/spinal cord regions other than medulla and pons, and correlations in each brain region achieving high levels of statistical significance. Certain NHPs were identified as mis-dosed at initial administration of duplex, particularly some animals that had received the AD-1747580 duplex. Such animals were re-dosed and monitored beyond day 84, and it was demonstrated that such redosing resulted in significant reduction of α-Synuclein protein levels across the various brain regions examined (FIG. 12D, top and bottom panels, with bottom panel omitting data associated with the documented mis-dosing event(s)). Specifically, re-dosed NHPs examined at beyond day 84 showed robust α-Synuclein protein knockdown in cortex and midbrain tissues, while the greatest magnitude of α-Synuclein protein knockdown was observed in the striatum (caudate), where knockdown levels in excess of 90% reduction were detected in re-dosed animals (FIG. 12D). Indeed, even NHP animals that had not met successful dosing criteria at both dosing times (when measured at 24 hours post-administration for levels in cerebrospinal fluid (CSF)) at initial duplex administration exhibited knockdown levels that exceeded 90% in the caudate striatum. Notably, tissue protein pharmacodynamics exhibited similar profiles for all three duplexes in the various CNS regions examined. When re-dosed NHP animals were examined for α-Synuclein protein levels in cerebrospinal fluid (CSF) across an extended time course that included redose and monitoring at time points beyond day 84, CSF α-Synuclein protein levels exhibited up to a 75% reduction for animals (re)dosed with duplex AD-1747585, while CSF α-Synuclein protein levels exhibited up to a 50% reduction for animals (re)dosed with duplexes AD-1747580 and AD-1747583 (FIG. 12E).

[0664] Properly dosed NHP animals were also assessed for α-Synuclein protein levels in CSF at day 84 post-duplex administration. Observed levels of α-Synuclein protein in NHP CSF were up to 90% reduced (PD effect) for animals dosed with duplexes AD-1747580 and AD-1747583 (FIG. 13). These knockdown results (PD effects) for duplexes AD-1747580 and AD-1747583 were closely correlated with measured PK values at 24 hours in CSF. NHP animals dosed with duplex AD-1747585 showed ˜75% α-Synuclein protein knockdown in CSF. Duplex AD-1747585-dosed animals notably also exhibited variable CSF α-Synuclein protein knockdown, potentially due to blood contamination, as SNCA is highly expressed in blood cells. Blood cell count data can be assessed, to verify whether blood contamination did indeed occur.

[0665] At day 29 post-duplex administration, α-Synuclein protein in the cortex and midbrain of treated NHPs exhibited only modest (<60%) knockdown for all three lead duplexes tested (FIG. 14A, left panel). Such modest reductions in α-Synuclein protein levels in cortex and midbrain were indicative of an extended half-life for α-Synuclein protein in such tissues. Tissue protein PK/PD was observed to be scattered for all three tested duplexes (FIG. 14A, middle panel); however, tissue α-Synuclein protein level was highly correlated with tissue SNCA mRNA level (FIG. 14A, right panel). When levels in CSF were also examined, α-Synuclein protein knockdown in CSF correlated with cortex (FIG. 14B, left panel) and striatal (FIG. 14B, middle panel) α-Synuclein protein knockdown at day 29 post-administration. Indeed, correlation in the cortex vs CSF α-Synuclein protein knockdown levels was observed to be similar to that seen previously with antisense oligonucleotides targeting SNCA in NHPs. In contrast, midbrain tissue α-Synuclein protein knockdown did not correlate well with CSF α-Synuclein protein knockdown at day 29 post-administration (FIG. 14B, right panel). While SNCA mRNA levels were reduced at day 29 post-administration (here, of SNCA-targeting duplex AD-1747580) in prefrontal cortex and midbrain tissues, α-Synuclein protein levels were only modestly reduced, which indicated that a long protein half-life for α-Synuclein protein was likely to explain this discrepancy (FIG. 14C). Indeed, the protein half-life of superoxide dismutase type 1 (SOD1) has been assessed to be −28 days in tissue, and it was apparent that a similar half-life for α-Synuclein protein might apply in cortex and midbrain tissues. Further evidence that an α-Synuclein protein half-life effect likely caused the disparity between SNCA mRNA and α-Synuclein protein knockdown results at day 29 post-administration was obtained when day 84 post-administration data were obtained. In such day 84 data, α-Synuclein protein levels in the cortex and midbrain tissues of treated NHP animals exhibited robust knockdown for all three lead duplexes (PD effect, FIG. 14D, left panel). Robust α-Synuclein protein knockdown observed at day 84 in cortex and midbrain NHP tissues confirmed a long protein half-life for α-Synuclein. Tissue α-Synuclein protein PK/PD curves showed similar profiles for all three duplexes (FIG. 14D, middle panel; AD-1747585 cohort is noted as only having had one animal that met dosing criteria, while the remainder of the cohort was re-dosed). α-Synuclein protein levels were highly correlated with mRNA levels in both cortex and midbrain tissues at day 84 (FIG. 14D, right panel), in contrast to those observed above at day 29 post-administration.

[0666] At day 84 post-duplex administration, the prefrontal cortex and midbrain tissue α-Synuclein protein knockdown levels also correlated well with α-Synuclein CSF protein knockdown (FIG. 15). Correlation in the cortex vs. CSF α-Synuclein protein knockdown levels (R squared=0.7246, P value=0.0004) was even better than previously described for antisense oligonucleotides targeting SNCA in NHP (R squared=0.6, P value=0.0089).

[0667] siRNA tissue exposure was also examined across brain regions at day 84 post-duplex administration. All three candidate duplexes showed good distribution into all examined target tissues, in most NHP animals that were dosed with such duplexes (FIG. 16). Interestingly, the tissues of greatest exposure to siRNA duplexes (e.g., prefrontal cortex) did not necessarily show the greatest observed levels of SNCA mRNA and/or α-Synuclein protein knockdown.

[0668] To assess and ultimately attempt to mitigate against any potential detrimental impacts of dosing of candidate lead duplexes to NHP animals, body weight of dosed animals and Neurofilament light chain (NfL) levels in CSF responsive to duplex dosing of animals were monitored as initial indicators of the health of such animals and potential toxicity of the tested duplexes to such animals, while genomic assessments for any significant off-target gene impacts in dosed NHP animals were also performed using RNA-seq. No impact upon body weight was observed for the three candidate lead duplexes administered to NHP animals, either at day 29 or day 84 post-administration, as compared to control NHP animals dosed in parallel with vehicle only (FIG. 17). For NfL detection in CSF of duplex-dosed NHP animals, while transient spikes in NfL were observed after dosing for all three duplexes, such NfL spikes largely did not persist beyond day 29 post-administration, which indicated that the three SNCA-targeting candidate lead duplexes did not appear to have an NfL profile suggestive of duplex toxicity (FIG. 18). RNA-Seq data were also obtained and evaluated for cells dosed with each of the three candidate lead duplexes, to identify the extent of off-target effects caused by dosing with each such duplex. RNA-Seq data for each of the three candidate lead duplexes examined. For the AD-1747580 duplex, as well as for parent duplex AD-1549054, SNCA knockdown was uniformly robust and no significant off-target effects (dysregulated off-target genes at >50%) were identified in potency-matched RNA-Seq profiles (FIGS. 19A and 19B). In contrast with the clean RNA-Seq results obtained for the AD-1747580 duplex, RNA-Seq results obtained for the AD-1747583 duplex revealed robust SNCA mRNA knockdown that was accompanied by three genes identified as dysregulated at >50%, PYGB, NREP and LCLAT1 (FIG. 19C). For duplex AD-1747585, robust SNCA mRNA knockdown that was accompanied by one gene identified as dysregulated at >50%, HMGB2 (FIG. 19D). Removal of GalNAc from parent duplexes was identified as associated with an increase in potency, both on- and off-target.

[0669] The AD-1747580 duplex was therefore identified via RNA-Seq to possess the most favorable selectivity profile among the three candidate lead duplexes tested (AD-1747580 exhibited 93% SNCA knockdown with no off-target gene dysregulation detected; AD-1747585 exhibited 96% SNCA knockdown with a single off-target gene dysregulated; and AD-1747583 exhibited 92% SNCA knockdown, but with three off-target genes dysregulated) (FIG. 20).

### Example 5: SNCA-Targeting Duplexes for Parkinson's Disease Therapy

[0670] SNCA-targeting duplexes are administered to a subject to knock down SNCA as a Parkinson's disease (PD) therapy, particularly in subjects having a GBA_{PD} mutation (GBA encodes for the lysosornal enzyme glucocerebrosidase (GCase)). Evaluations are performed to assess the extent to which administration of SNCA-targeting duplexes to a subject constitute a disease-modifying therapy for neurodegenerative diseases characterized by alpha synuclein aggregates in the brain (such as PD in subjects having a GBA_{PD} mutation).

[0671] The “mRNA” sequences of the Informal Sequence Listing and certain of the “mRNA target” sequences listed herein may be noted as reciting thymine (T) residues rather than uracil (U) residues. As is apparent to one of ordinary skill in the art, such sequences reciting “T” residues rather than “U” residues can be derived from NCBI accession records that list, as “mRNA” sequences, the DNA sequences (not RNA sequences) that directly correspond to mRNA sequences. Such DNA sequences that directly correspond to mRNA sequences technically constitute the DNA sequence that is the complement of the cDNA (complementary DNA) sequence for an indicated mRNA. Thus, while the mRNA target sequence does, in fact, actually include uracil (U) rather than thymine (T), the NCBI record-derived “mRNA” sequence includes thymine (T) residues rather than uracil (U) residues.

TABLE 1
Abbreviations of nucleotide monomers used in nucleic acid sequence representation
It will be understood that these monomers, when present in an oligonucleotide, are mutually linked
by 5′-3′-phosphodiester bonds; and it is understood that when the nucleotide contains a 2′-fluoro
modification, then the fluoro replaces the hydroxy at that position in the parent nucleotide (i.e., it
is a 2′-deoxy-2′-fluoronucleotide).

| Abbreviation | Nucleotide(s) |
|---|---|
| A | Adenosine-3′-phosphate |
| Aam | 2′-O-(N-methylacetamide)adenosine-3′-phosphate |
| Aams | 2′-O-(N-methylacetamide)adenosine-3′-phosphorothioate |
| Ab | beta-L-adenosine-3′-phosphate |
| Abs | beta-L-adenosine-3′-phosphorothioate |
| Af | 2′-fluoroadenosine-3′-phosphate |
| Afs | 2′-fluoroadenosine-3′-phosphorothioate |
| Agn | Adenosine-glycol nucleic acid (GNA), S-isomer |
| Ahd | 2′-O-hexadecyl adenosine-3′-phosphate |
| Ahds | 2′-O-hexadecyl-adenosine-3′-phosphorothioate |
| As | adenosine-3′-phosphorothioate |
| C | cytidine-3′-phosphate |
| Cb | beta-L-cytidine-3′-phosphate |
| Cbs | beta-L-cytidine-3′-phosphorothioate |
| Cf | 2′-fluorocytidine-3′-phosphate |
| Cfs | 2′-fluorocytidine-3′-phosphorothioate |
| Cgn | Cytidine-glycol nucleic acid (GNA), S-isomer |
| Chd | 2′-O-hexadecyl cytidine-3′-phosphate |
| Chds | 2′-O-hexadecyl-cytidine-3′-phosphorothioate |
| Cs | cytidine-3′-phosphorothioate |
| G | guanosine-3'-phosphate |
| Gam | 2′-O-(N-methylacetamide)guanosine-3′-phosphate |
| Gams | 2′-O-(N-methylacetamide)guanosine-3′-phosphorothioate |
| Gb | beta-L-guanosine-3′-phosphate |
| Gbs | beta-L-guanosine-3′-phosphorothioate |
| Gf | 2′-fluoroguanosine-3′-phosphate |
| Gfs | 2′-fluoroguanosine-3′-phosphorothioate |
| Ggn | Guanosine-glycol nucleic acid (GNA), S-isomer |
| Ghd | 2′-O-hexadecyl guanosine-3′-phosphate |
| Ghds | 2′-O-hexadecyl-guanosine-3′-phosphorothioate |
| Gs | guanosine-3′-phosphorothioate |
| T | 5′-methyluridine-3′-phosphate |
| Tam | 2′-O-(N-methylacetamide)thymidine-3′-phosphate |
| Tams | 2′-O-(N-methylacetamide)thymidine-3′-phosphorothioate |
| Tf | 2′-fluoro-5-methyluridine-3′-phosphate |
| Tfs | 2′-fluoro-5-methyluridine-3′-phosphorothioate |
| Tgn | Thymidine-glycol nucleic acid (GNA), S-Isomer |
| Ts | 5-methyluridine-3′-phosphorothioate |
| U | Uridine-3′-phosphate |
| Uf | 2′-fluorouridine-3′-phosphate |
| Ufs | 2′-fluorouridine -3′-phosphorothioate |
| Uhd | 2′-O-hexadecyl uridine-3′-phosphate |
| Uhds | 2′-O-hexadecyl-uridine-3′-phosphorothioate |
| Us | uridine-3′-phosphorothioate |
| N | any nucleotide (G, A, C, T or U), modified or unmodified |
| a | 2′-O-methyladenosine-3′-phosphate |
| as | 2′-O-methyladenosine-3′-phosphorothioate |
| c | 2′-O-methylcytidine-3′-phosphate |
| cs | 2′-O-methylcytidine-3′-phosphorothioate |
| g | 2′-O-methylguanosine-3′-phosphate |
| gs | 2′-O-methylguanosine-3′-phosphorothioate |
| t | 2′-O-methyl-5-methyluridine-3′-phosphate |
| ts | 2′-O-methyl-5-methyluridine-3′-phosphorothioate |
| u | 2′-O-methyluridine-3′-phosphate |
| us | 2′-O-methyluridine-3′-phosphorothioate |
| s | phosphorothioate linkage |
| (C2p) | cytidine-2′-phosphate |
| (G2p) | guanosine-2′-phosphate |
| (U2p) | uridine-2′-phosphate |
| (A2p) | adenosine-2′-phosphate |
| L96 | N-[tris(GalNAc)-amido-dodecanoyl)]-4-hydroxyprolinol[Hyp-(GalNAc-alkyl)3] |
| | [chemical structure] |
| Y34 | 2-hydroxymethyl-tetrahydrofurane-4-methoxy-3-phosphate (abasic 2′-OMe |
| | furanose) |
| | [chemical structure] |
| Y44 | inverted abasic DNA (2-hydroxymethyl-tetrahydrofurane-5-phosphate) |
| | [chemical structure] |
| dA | 2′-deoxyadenosine-3′-phosphate |
| dAs | 2′-deoxyadenosine-3′-phosphorothioate |
| dC | 2′-deoxycytidine-3′-phosphate |
| dCs | 2′-deoxycytidine-3′-phosphorothioate |
| dG | 2′-deoxyguanosine-3′-phosphate |
| dGs | 2′-deoxyguanosine-3′-phosphorothioate |
| dT | 2′-deoxythymidine-3′-phosphate |
| dTs | 2′-deoxythymidine-3′-phosphorothioate |
| dU | 2′-deoxyuridine |
| dUs | 2′-deoxyuridine-3′-phosphorothioate |
| Aeo | 2′-O-methoxyethyladenosine-3′-phosphate |
| Aeos | 2′-O-methoxyethyladenosine-3′-phosphorothioate |
| Geo | 2′-O-methoxyethylguanosine-3′-phosphate |
| Geos | 2′-O-methoxyethylguanosine-3′-phosphorothioate |
| Teo | 2′-O-methoxyethyl-5-methyluridine-3′-phosphate |
| Teos | 2′-O-methoxyethyl-5-methyluridine-3′-phosphorothioate |
| m5Ceo | 2′-O-methoxyethyl-5-methylcytidine-3′-phosphate |
| m5Ceos | 2′-O-methoxyethyl-5-methylcytidine-3′-phosphorothioate |
| A3m | 3′-O-methyladenosine-2′-phosphate |
| A3mx | 3′-O-methyl-xylofuranosyladenosine-2′-phosphate |
| G3m | 3′-O-methylguanosine-2′-phosphate |
| G3mx | 3′-O-methyl-xylofuranosylguanosine-2′-phosphate |
| C3m | 3′-O-methylcytidine-2′-phosphate |
| C3mx | 3′-O-methyl-xylofuranosylcytidine-2′-phosphate |
| U3m | 3′-O-methyluridine-2′-phosphate |
| U3mx | 3′-O-methyl-xylofuranosyluridine-2′-phosphate |
| m5Cam | 2′-O-(N-methylacetamide)-5-methylcytidine-3′-phosphate |
| m5Cams | 2′-O-(N-methylacetamide)-5-methylcytidine-3′-phosphorothioate |
| P | Phosphate |
| pshe | Hydroxyethylphosphorothioate |
| VP | Vinyl-phosphonate |
| (Aah) | 2′-O-(6-aminohexyl)-adenosine-3′-phosphate |
| (Gah) | 2′-O-(6-aminohexyl)-guanosine-3′-phosphate |
| (Cah) | 2′-O-(6-aminohexyl)-cytidine-3′-phosphate |
| (Uah) | 2′-O-(6-aminohexyl)-uridine-3′-phosphate |
| Y196 | 2′-O-(6-aminohexyl-metaiodobenzoyl)-uridine-3′-phosphate (Uah with iodo- |
| | benzoyl) |

(Uah) [chemical structure]
Y196

[chemical structure]

TABLE 2
Modified Sense and Antisense Strand Sequences of CNS-Directed SNCA-Targeting siRNAs

| | | SEQ | | SEQ | | SEQ | Parent |
|---|---|---|---|---|---|---|---|
| Duplex | Sense Oligo | ID | Antisense Oligo | ID | mRNA Target | ID | Duplex |
| Name | Sequence | NO: | Sequence | NO: | Sequence | NO: | Name |
| AD- | gsusgug(Ghd)Ufg | 13 | VPusUfsgadAu(Tg | 56 | CAGUGUGGUGUAA | 99 | AD- |
| 1804698 | UfAfAfaggaauucs | | n)ccuuuaCfaCfca | | AGGAAUUCAU | | 1571164 |
| | asa | | cacsusg | | | | |
| AD- | usgsugg(Uhd)guA | 14 | VPusdAsugdAadTu | 57 | AGUGUGGUGUAAA | 100 | AD- |
| 1804699 | fAfAfggaauucasu | | ccudTuAfcaccaca | | GGAAUUCAUU | | 1548851 |
| | sa | | scsu | | | | |
| AD- | gsgsugu(Ahd)aaG | 15 | VPusdCsuadAudGa | 58 | GUGGUGUAAAGGA | 101 | AD- |
| 1747575 | fGfAfauucauuasg | | auudCcUfuuacace | | AUUCAUUAGC | | 1548854 |
| | sa | | sasc | | | | |
| AD- | asusuag(Chd)caU | 16 | VPusdTsgadAudAc | 59 | UCAUUAGCCAUGG | 102 | AD- |
| 1747576 | fGfGfauguauucsa | | aucdCaUfggcuaau | | AUGUAUUCAU | | 1548869 |
| | sa | | sgsa | | | | |
| AD- | ususagc(Chd)auG | 17 | VPusdAsugdAadTa | 60 | CAUUAGCCAUGGA | 103 | AD- |
| 1804700 | fGfAfuguauucasu | | caudCcAfuggcuaa | | UGUAUUCAUG | | 1548870 |
| | sa | | susg | | | | |
| AD- | asusuca(Uhd)gaA | 18 | VPusdTsugdAadAg | 61 | GUAUUCAUGAAAG | 104 | AD- |
| 1747577 | fAfGfgacuuucasa | | uccdTuUfcaugaau | | GACUUUCAAA | | 1548884 |
| | sa | | sasc | | | | |
| AD- | uscsaug(Ahd)aaG | 19 | VPusdCsuudTgdAa | 62 | AUUCAUGAAAGGA | 105 | AD- |
| 1747578 | fGfAfcuuucaaasg | | agudCcUfuucauga | | CUUUCAAAGG | | 1548886 |
| | sa | | sasu | | | | |
| AD- | asasgag(Chd)aaG | 20 | VPusdAsacdAudTu | 63 | CAAAGAGCAAGUG | 106 | AD- |
| 1747579 | fUfGfacaaaugusu | | gucdAcUfugcucuu | | ACAAAUGUUG | | 1549052 |
| | sa | | susg | | | | |
| AD- | gsasgca(Ahd)guG | 21 | VPusdCscadAcdAu | 64 | AAGAGCAAGUGAC | 107 | AD- |
| 1747580 | fAfCfaaauguugsg | | uugdTcAfcuugcuc | | AAAUGUUGGA | | 1549054 |
| | sa | | susu | | | | |
| AD- | asasggg(Uhd)auC | 22 | VPusdTsucdGudAg | 65 | GGAAGGGUAUCAA | 108 | AD- |
| 1747581 | fAfAfgacuacgasa | | ucudTgAfuacccuu | | GACUACGAAC | | 1549245 |
| | sa | | scsc | | | | |
| AD- | csusgaa(Ghd)ccU | 23 | VPusdAsgadTadTu | 66 | ACCUGAAGCCUAA | 109 | AD- |
| 1804701 | fAfAfgaaauaucsu | | ucudTaGfgcuucag | | GAAAUAUCUU | | 1549266 |
| | sa | | sgsu | | | | |
| AD- | usgsaag(Chd)cuA | 24 | VPusdAsagdAudAu | 67 | CCUGAAGCCUAAG | 110 | AD- |
| 1747582 | fAfGfaaauaucusu | | uucdTuAfggcuuca | | AAAUAUCUUU | | 1549267 |
| | sa | | sgsg | | | | |
| AD- | asasgcc(Uhd)aaG | 25 | VPusdCsaadAgdAu | 68 | UGAAGCCUAAGAA | 111 | AD- |
| 1804702 | fAfAfauaucuuusg | | auudTcUfuaggcuu | | AUAUCUUUGC | | 1549269 |
| | sa | | scsa | | | | |
| AD- | cscsuaa(Ghd)aaA | 26 | VPusdGsagdCadAa | 69 | AGCCUAAGAAAUA | 112 | AD- |
| 1804703 | fUfAfucuuugcusc | | gaudAuUfucuuagg | | UCUUUGCUCC | | 1549272 |
| | sa | | scsu | | | | |
| AD- | uscsuuu(Ghd)cuC | 27 | VPusdCsaadGadAa | 70 | UAUCUUUGCUCCC | 113 | AD- |
| 1804704 | fCfCfaguuucuusg | | cugdGgAfgcaaaga | | AGUUUCUUGA | | 1549283 |
| | sa | | susa | | | | |
| AD- | uscsuuugcuCfCfC | 28 | VPusdCsaadGadAa | 71 | UAUCUUUGCUCCC | 114 | AD- |
| 1747583 | faguu(Uhd)cuusg | | cugdGgAfgcaaaga | | AGUUUCUUGA | | 1746465 |
| | sa | | susa | | | | |
| AD- | csusuug(Chd)ucC | 29 | VPusdTscadAgdAa | 72 | AUCUUUGCUCCCA | 115 | AD- |
| 1804705 | fCfAfguuucuugsa | | acudGgGfagcaaag | | GUUUCUUGAG | | 1549284 |
| | sa | | sasu | | | | |
| AD- | ususugc(Uhd)ccC | 30 | VPusdCsucdAadGa | 73 | UCUUUGCUCCCAG | 116 | AD- |
| 1804706 | fAfGfuuucuugasg | | aacdTgGfgagcaaa | | UUUCUUGAGA | | 1549285 |
| | sa | | sgsa | | | | |
| AD- | uscscca(Ghd)uuU | 31 | VPusdCsagdAudCu | 74 | GCUCCCAGUUUCU | 117 | AD- |
| 1804707 | fCfUfugagaucusg | | caadGaAfacuggga | | UGAGAUCUGC | | 1549290 |
| | sa | | sgsc | | | | |
| AD- | csusgua(Chd)Afa | 32 | VPusGfsgadAc(Tg | 75 | UCCUGUACAAGUG | 118 | AD- |
| 1804708 | GfUfGfcucaguucs | | n)gagcacUfuGfua | | CUCAGUUCCA | | 1571187 |
| | csa | | cagsgsa | | | | |
| AD- | usgsuac(Ahd)Afg | 33 | VPusUfsggdAa(C2 | 76 | CCUGUACAAGUGC | 119 | AD- |
| 1804709 | UfGfCfucaguuccs | | p)ugagcaCfuUfgu | | UCAGUUCCAA | | 1571262 |
| | asa | | acasgsg | | | | |
| AD- | gsusaca(Ahd)Gfu | 34 | VPusUfsugdGa(Ag | 77 | CUGUACAAGUGCU | 120 | AD- |
| 1747591 | GfCfUfcaguuccas | | n)cugagcAfcUfug | | CAGUUCCAAU | | 1571188 |
| | asa | | uacsasg | | | | |
| AD- | asasgug(Chd)ucA | 35 | VPusdCsacdAudTg | 78 | ACAAGUGCUCAGU | 121 | AD- |
| 1747585 | fGfUfuccaaugusg | | gaadCuGfagcacuu | | UCCAAUGUGC | | 1549333 |
| | sa | | sgsu | | | | |
| AD- | asgsugc(Uhd)caG | 36 | VPusdGscadCadTu | 79 | CAAGUGCUCAGUU | 122 | AD- |
| 1804710 | fUfUfccaaugugsc | | ggadAcUfgagcacu | | CCAAUGUGCC | | 1549334 |
| | sa | | susg | | | | |
| AD- | usgsccc(Ahd)guC | 37 | VPusdAsgadAadTg | 80 | UGUGCCCAGUCAU | 123 | AD- |
| 1804711 | fAfUfgacauuucsu | | ucadTgAfcugggca | | GACAUUUCUC | | 1549351 |
| | sa | | scsa | | | | |
| AD- | cscsagu(Chd)auG | 38 | VPusdTsugdAgdAa | 81 | GCCCAGUCAUGAC | 124 | AD- |
| 1747586 | fAfCfauuucucasa | | augdTcAfugacugg | | AUUUCUCAAA | | 1549354 |
| | sa | | sgsc | | | | |
| AD- | gsuscau(Ghd)acA | 39 | VPusdAscudTudGa | 82 | CAGUCAUGACAUU | 125 | AD- |
| 1804712 | fUfUfucucaaagsu | | gaadAuGfucaugac | | UCUCAAAGUU | | 1549357 |
| | sa | | susg | | | | |
| AD- | csasuga(Chd)auU | 40 | VPusdAsaadCudTu | 83 | GUCAUGACAUUUC | 126 | AD- |
| 1747587 | fUfCfucaaaguusu | | gagdAaAfugucaug | | UCAAAGUUUU | | 1549359 |
| | sa | | sasc | | | | |
| AD- | uscsuuc(Chd)auC | 41 | VPusdCsaadTcdAc | 84 | AGUCUUCCAUCAG | 127 | AD- |
| 1804713 | fAfGfcagugauusg | | ugcdTgAfuggaaga | | CAGUGAUUGA | | 1549397 |
| | sa | | scsu | | | | |
| AD- | ususcca(Uhd)Cfa | 42 | VPusUfsucdAa(Tg | 85 | UCUUCCAUCAGCA | 128 | AD- |
| 1804714 | GfCfAfgugauugas | | n)cacugcUfgAfug | | GUGAUUGAAG | | 1571191 |
| | asa | | gaasgsa | | | | |
| AD- | cscsauc(Ahd)gcA | 43 | VPusdAscudTcdAa | 86 | UUCCAUCAGCAGU | 129 | AD- |
| 1747588 | fGfUfgauugaagsu | | ucadCuGfcugaugg | | GAUUGAAGUA | | 1549401 |
| | sa | | sasa | | | | |
| AD- | cscsauc(Ahd)Gfc | 44 | VPusAfscudTc(Ag | 87 | UUCCAUCAGCAGU | 130 | AD- |
| 1804715 | AfGfUfgauugaags | | n)aucacuGfcUfga | | GAUUGAAGUA | | 1571192 |
| | usa | | uggsasa | | | | |
| AD- | asuscag(Chd)agU | 45 | VPusdAsuadCudTc | 88 | CCAUCAGCAGUGA | 131 | AD- |
| 1804716 | fGfAfuugaaguasu | | aaudCaCfugcugau | | UUGAAGUAUC | | 1549403 |
| | sa | | sgsg | | | | |
| AD- | asuscag(Chd)Afg | 46 | VPusAfsuadCu(Tg | 89 | CCAUCAGCAGUGA | 132 | AD- |
| 1804717 | UfGfAfuugaaguas | | n)caaucaCfuGfcu | | UUGAAGUAUC | | 1571193 |
| | usa | | gausgsg | | | | |
| AD- | asgscag(Uhd)gaU | 47 | VPusdCsagdAudAc | 90 | UCAGCAGUGAUUG | 133 | AD- |
| 1804718 | fUfGfaaguaucusg | | uucdAaUfcacugcu | | AAGUAUCUGU | | 1549406 |
| | sa | | sgsa | | | | |
| AD- | gscsagu(Ghd)auU | 48 | VPusdAscadGadTa | 91 | CAGCAGUGAUUGA | 134 | AD- |
| 1804719 | fGfAfaguaucugsu | | cuudCaAfucacugc | | AGUAUCUGUA | | 1549407 |
| | sa | | susg | | | | |
| AD- | gscsagu(Ghd)Afu | 49 | VPusAfscadGa(Tg | 92 | CAGCAGUGAUUGA | 135 | AD- |
| 1804720 | UfGfAfaguaucugs | | n)acuucaAfuCfac | | AGUAUCUGUA | | 1571194 |
| | usa | | ugcsusg | | | | |
| AD- | ususcac(Uhd)gaA | 50 | VPusdCsaudGudAu | 93 | CUUUCACUGAAGU | 136 | AD- |
| 1804721 | fGfUfgaauacausg | | ucadCuUfcagugaa | | GAAUACAUGG | | 1549439 |
| | sa | | sasg | | | | |
| AD- | usasagu(Ghd)acU | 51 | VPusdAsaadTadAg | 94 | CCUAAGUGACUAC | 137 | AD- |
| 1804722 | fAfCfcacuuauusu | | uggdTaGfucacuua | | CACUUAUUUC | | 1549518 |
| | sa | | sgsg | | | | |
| AD- | csusacc(Ahd)cuU | 52 | VPusdGsaudTudAg | 95 | GACUACCACUUAU | 138 | AD- |
| 1804723 | fAfUfuucuaaausc | | aaadTaAfgugguag | | UUCUAAAUCC | | 1549525 |
| | sa | | susc | | | | |
| AD- | csusacc(Ahd)Cfu | 53 | VPusGfsaudTu(Ag | 96 | GACUACCACUUAU | 139 | AD- |
| 1804724 | UfAfUfuucuaaaus | | n)gaaauaAfgUfgg | | UUCUAAAUCC | | 1571199 |
| | csa | | uagsusc | | | | |
| AD- | usasugu(Ghd)agC | 54 | VPusdCsaudAgdTu | 97 | AAUAUGUGAGCAU | 140 | AD- |
| 1804725 | fAfUfgaaacuausg | | ucadTgCfucacaua | | GAAACUAUGC | | 1549628 |
| | sa | | susu | | | | |
| AD- | asascua(Uhd)gcA | 55 | VPusdGsuadTudTa | 98 | GAAACUAUGCACC | 141 | AD- |
| 1804726 | fCfCfuauaaauasc | | uagdGuGfcauaguu | | UAUAAAUACU | | 1549641 |
| | sa | | susc | | | | |

TABLE 3
Unmodified Sense and Antisense Strand Sequences of
CNS-Directed SNCA-Targeting SIRNAs

| | | SEQ | | SEQ |
|---|---|---|---|---|
| Duplex | | ID | | ID |
| Name | Sense Oligo Sequence | NO: | Antisense Oligo Sequence | NO: |
| AD- | GUGUGGUGUAAAGGAAUUCAA | 142 | UUGAAUTCCUUUACACCACACUG | 185 |
| 1804698 | | | | |
| AD- | UGUGGUGUAAAGGAAUUCAUA | 143 | UAUGAATUCCUTUACACCACACU | 186 |
| 1804699 | | | | |
| AD- | GGUGUAAAGGAAUUCAUUAGA | 144 | UCUAAUGAAUUCCUUUACACCAC | 187 |
| 1747575 | | | | |
| AD- | AUUAGCCAUGGAUGUAUUCAA | 145 | UTGAAUACAUCCAUGGCUAAUGA | 188 |
| 1747576 | | | | |
| AD- | UUAGCCAUGGAUGUAUUCAUA | 146 | UAUGAATACAUCCAUGGCUAAUG | 189 |
| 1804700 | | | | |
| AD | AUUCAUGAAAGGACUUUCAAA | 147 | UTUGAAAGUCCTUUCAUGAAUAC | 190 |
| 1747577 | | | | |
| AD- | UCAUGAAAGGACUUUCAAAGA | 148 | UCUUTGAAAGUCCUUUCAUGAAU | 191 |
| 1747578 | | | | |
| AD- | AAGAGCAAGUGACAAAUGUUA | 149 | UAACAUTUGUCACUUGCUCUUUG | 192 |
| 1747579 | | | | |
| AD- | GAGCAAGUGACAAAUGUUGGA | 150 | UCCAACAUUUGTCACUUGCUCUU | 193 |
| 1747580 | | | | |
| AD- | AAGGGUAUCAAGACUACGAAA | 151 | UTUCGUAGUCUTGAUACCCUUCC | 194 |
| 1747581 | | | | |
| AD- | CUGAAGCCUAAGAAAUAUCUA | 152 | UAGATATUUCUTAGGCUUCAGGU | 195 |
| 1804701 | | | | |
| AD- | UGAAGCCUAAGAAAUAUCUUA | 153 | UAAGAUAUUUCTUAGGCUUCAGG | 196 |
| 1747582 | | | | |
| AD- | AAGCCUAAGAAAUAUCUUUGA | 154 | UCAAAGAUAUUTCUUAGGCUUCA | 197 |
| 1804702 | | | | |
| AD- | CCUAAGAAAUAUCUUUGCUCA | 155 | UGAGCAAAGAUAUUUCUUAGGCU | 198 |
| 1804703 | | | | |
| AD- | UCUUUGCUCCCAGUUUCUUGA | 156 | UCAAGAAACUGGGAGCAAAGAUA | 199 |
| 1804704 | | | | |
| AD- | UCUUUGCUCCCAGUUUCUUGA | 157 | UCAAGAAACUGGGAGCAAAGAUA | 200 |
| 1747583 | | | | |
| AD- | CUUUGCUCCCAGUUUCUUGAA | 158 | UTCAAGAAACUGGGAGCAAAGAU | 201 |
| 1804705 | | | | |
| AD- | UUUGCUCCCAGUUUCUUGAGA | 159 | UCUCAAGAAACTGGGAGCAAAGA | 202 |
| 1804706 | | | | |
| AD- | UCCCAGUUUCUUGAGAUCUGA | 160 | UCAGAUCUCAAGAAACUGGGAGC | 203 |
| 1804707 | | | | |
| AD- | CUGUACAAGUGCUCAGUUCCA | 161 | UGGAACTGAGCACUUGUACAGGA | 204 |
| 1804708 | | | | |
| AD- | UGUACAAGUGCUCAGUUCCAA | 162 | UUGGAACUGAGCACUUGUACAGG | 205 |
| 1804709 | | | | |
| AD- | GUACAAGUGCUCAGUUCCAAA | 163 | UUUGGAACUGAGCACUUGUACAG | 206 |
| 1747591 | | | | |
| AD- | AAGUGCUCAGUUCCAAUGUGA | 164 | UCACAUTGGAACUGAGCACUUGU | 207 |
| 1747585 | | | | |
| AD- | AGUGCUCAGUUCCAAUGUGCA | 165 | UGCACATUGGAACUGAGCACUUG | 208 |
| 1804710 | | | | |
| AD- | UGCCCAGUCAUGACAUUUCUA | 166 | UAGAAATGUCATGACUGGGCACA | 209 |
| 1804711 | | | | |
| AD- | CCAGUCAUGACAUUUCUCAAA | 167 | UTUGAGAAAUGTCAUGACUGGGC | 210 |
| 1747586 | | | | |
| AD- | GUCAUGACAUUUCUCAAAGUA | 168 | UACUTUGAGAAAUGUCAUGACUG | 211 |
| 1804712 | | | | |
| AD- | CAUGACAUUUCUCAAAGUUUA | 169 | UAAACUTUGAGAAAUGUCAUGAC | 212 |
| 1747587 | | | | |
| AD- | UCUUCCAUCAGCAGUGAUUGA | 170 | UCAATCACUGCTGAUGGAAGACU | 213 |
| 1804713 | | | | |
| AD- | UUCCAUCAGCAGUGAUUGAAA | 171 | UUUCAATCACUGCUGAUGGAAGA | 214 |
| 1804714 | | | | |
| AD- | CCAUCAGCAGUGAUUGAAGUA | 172 | UACUTCAAUCACUGCUGAUGGAA | 215 |
| 1747588 | | | | |
| AD- | CCAUCAGCAGUGAUUGAAGUA | 173 | UACUTCAAUCACUGCUGAUGGAA | 216 |
| 1804715 | | | | |
| AD- | AUCAGCAGUGAUUGAAGUAUA | 174 | UAUACUTCAAUCACUGCUGAUGG | 217 |
| 1804716 | | | | |
| AD- | AUCAGCAGUGAUUGAAGUAUA | 175 | UAUACUTCAAUCACUGCUGAUGG | 218 |
| 1804717 | | | | |
| AD- | AGCAGUGAUUGAAGUAUCUGA | 176 | UCAGAUACUUCAAUCACUGCUGA | 219 |
| 1804718 | | | | |
| AD- | GCAGUGAUUGAAGUAUCUGUA | 177 | UACAGATACUUCAAUCACUGCUG | 220 |
| 1804719 | | | | |
| AD- | GCAGUGAUUGAAGUAUCUGUA | 178 | UACAGATACUUCAAUCACUGCUG | 221 |
| 1804720 | | | | |
| AD- | UUCACUGAAGUGAAUACAUGA | 179 | UCAUGUAUUCACUUCAGUGAAAG | 222 |
| 1804721 | | | | |
| AD- | UAAGUGACUACCACUUAUUUA | 180 | UAAATAAGUGGTAGUCACUUAGG | 223 |
| 1804722 | | | | |
| AD- | CUACCACUUAUUUCUAAAUCA | 181 | UGAUTUAGAAATAAGUGGUAGUC | 224 |
| 1804723 | | | | |
| AD- | CUACCACUUAUUUCUAAAUCA | 182 | UGAUTUAGAAAUAAGUGGUAGUC | 225 |
| 1804724 | | | | |
| AD- | UAUGUGAGCAUGAAACUAUGA | 183 | UCAUAGTUUCATGCUCACAUAUU | 226 |
| 1804725 | | | | |
| AD- | AACUAUGCACCUAUAAAUACA | 184 | UGUATUTAUAGGUGCAUAGUUUC | 227 |
| 1804726 | | | | |

### EQUIVALENTS

[0672] Those skilled in the art will recognize or be able to ascertain using no more than routine experimentation, many equivalents to the specific embodiments and methods described herein. Such equivalents are intended to be encompassed by the scope of the following claims.

The application's sequence listing, which the Patent Office published only in electronic form, follows.

SEQUENCE LISTING (379 sequences)

SEQ ID NO: 1 - DNA, 3312 bp, Homo sapiens
  source 1..3312: mol_type = other DNA
ggcgacgaccagaaggggcccaagagagggggcgagcgaccgagcgccgcgacgcggaagtgaggtgcgtgcgggctgcagcgcagaccccggcccggcccctccgagagcgtcctgggcgctccctcacgccttgccttcaagccttctgcctttccaccctcgtgagcggagaactgggagtggccattcgacgacaggttagcgggtttgcctcccactcccccagcctcgcgtcgccggctcacagcggcctcctctggggacagtcccccccgggtgccgcctccgcccttcctgtgcgctccttttccttcttctttcctattaaatattatttgggaattgtttaaattttttttttaaaaaaagagagaggcggggaggagtcggagttgtggagaagcagagggactcagtgtggtgtaaaggaattcattagccatggatgtattcatgaaaggactttcaaaggccaaggagggagttgtggctgctgctgagaaaaccaaacagggtgtggcagaagcagcaggaaagacaaaagagggtgttctctatgtaggctccaaaaccaaggagggagtggtgcatggtgtggcaacagtggctgagaagaccaaagagcaagtgacaaatgttggaggagcagtggtgacgggtgtgacagcagtagcccagaagacagtggagggagcagggagcattgcagcagccactggctttgtcaaaaaggaccagttgggcaaggaagggtatcaagactacgaacctgaagcctaagaaatatctttgctcccagtttcttgagatctgctgacagatgttccatcctgtacaagtgctcagttccaatgtgcccagtcatgacatttctcaaagtttttacagtgtatctcgaagtcttccatcagcagtgattgaagtatctgtacctgcccccactcagcatttcggtgcttccctttcactgaagtgaatacatggtagcagggtctttgtgtgctgtggattttgtggcttcaatctacgatgttaaaacaaattaaaaacacctaagtgactaccacttatttctaaatcctcactatttttttgttgctgttgttcagaagttgttagtgatttgctatcatatattataagatttttaggtgtcttttaatgatactgtctaagaataatgacgtattgtgaaatttgttaatatatataatacttaaaaatatgtgagcatgaaactatgcacctataaatactaaatatgaaattttaccattttgcgatgtgttttattcacttgtgtttgtatataaatggtgagaattaaaataaaacgttatctcattgcaaaaatattttatttttatcccatctcactttaataataaaaatcatgcttataagcaacatgaattaagaactgacacaaaggacaaaaatataaagttattaatagccatttgaagaaggaggaattttagaagaggtagagaaaatggaacattaaccctacactcggaattccctgaagcaacactgccagaagtgtgttttggtatgcactggttccttaagtggctgtgattaattattgaaagtggggtgttgaagaccccaactactattgtagagtggtctatttctcccttcaatcctgtcaatgtttgctttacgtattttggggaactgttgtttgatgtgtatgtgtttataattgttatacatttttaattgagccttttattaacatatattgttatttttgtctcgaaataattttttagttaaaatctattttgtctgatattggtgtgaatgctgtacctttctgacaataaataatattcgaccatgaataaaaaaaaaaaaaaagtgggttcccgggaactaagcagtgtagaagatgattttgactacaccctccttagagagccataagacacattagcacatattagcacattcaaggctctgagagaatgtggttaactttgtttaactcagcattcctcactttttttttttaatcatcagaaattctctctctctctctctctttttctctcgctctctttttttttttttttttacaggaaatgcctttaaacatcgttggaactaccagagtcaccttaaaggagatcaattctctagactgataaaaatttcatggcctcctttaaatgttgccaaatatatgaattctaggatttttccttaggaaaggtttttctctttcagggaagatctattaactccccatgggtgctgaaaataaacttgatggtgaaaaactctgtataaattaatttaaaaattatttggtttctctttttaattattctggggcatagtcatttctaaaagtcactagtagaaagtataatttcaagacagaatattctagacatgctagcagtttatatgtattcatgagtaatgtgatatatattgggcgctggtgaggaaggaaggaggaatgagtgactataaggatggttaccatagaaacttccttttttacctaattgaagagagactactacagagtgctaagctgcatgtgtcatcttacactagagagaaatggtaagtttcttgttttatttaagttatgtttaagcaaggaaaggatttgttattgaacagtatatttcaggaaggttagaaagtggcggttaggatatattttaaatctacctaaagcagcatattttaaaaatttaaaagtattggtattaaattaagaaatagaggacagaactagactgatagcagtgacctagaacaatttgagattaggaaagttgtgaccatgaatttaaggatttatgtggatacaaattctcctttaaagtgtttcttcccttaatatttatctgacggtaatttttgagcagtgaattactttatatatcttaatagtttatttgggaccaaacacttaaacaaaaagttctttaagtcatataagccttttcaggaagcttgtctcatattcactcccgagacattcacctgccaagtggcctgaggatcaatccagtcctaggtttattttgcagacttacattctcccaagttattcagcctcatatgactccacggtcggctttaccaaaacagttcagagtgcactttggcacacaattgggaacagaacaatctaatgtgtggtttggtattccaagtggggtctttttcagaatctctgcactagtgtgagatgcaaacatgtttcctcatctttctggcttatccagtatgtagctatttgtgacataataaatatatacatatatgaaaata

SEQ ID NO: 2 - DNA, 3312 bp, Homo sapiens
  source 1..3312: mol_type = other DNA
tattttcatatatgtatatatttattatgtcacaaatagctacatactggataagccagaaagatgaggaaacatgtttgcatctcacactagtgcagagattctgaaaaagaccccacttggaataccaaaccacacattagattgttctgttcccaattgtgtgccaaagtgcactctgaactgttttggtaaagccgaccgtggagtcatatgaggctgaataacttgggagaatgtaagtctgcaaaataaacctaggactggattgatcctcaggccacttggcaggtgaatgtctcgggagtgaatatgagacaagcttcctgaaaaggcttatatgacttaaagaactttttgtttaagtgtttggtcccaaataaactattaagatatataaagtaattcactgctcaaaaattaccgtcagataaatattaagggaagaaacactttaaaggagaatttgtatccacataaatccttaaattcatggtcacaactttcctaatctcaaattgttctaggtcactgctatcagtctagttctgtcctctatttcttaatttaataccaatacttttaaatttttaaaatatgctgctttaggtagatttaaaatatatcctaaccgccactttctaaccttcctgaaatatactgttcaataacaaatcctttccttgcttaaacataacttaaataaaacaagaaacttaccatttctctctagtgtaagatgacacatgcagcttagcactctgtagtagtctctcttcaattaggtaaaaaaggaagtttctatggtaaccatccttatagtcactcattcctccttccttcctcaccagcgcccaatatatatcacattactcatgaatacatataaactgctagcatgtctagaatattctgtcttgaaattatactttctactagtgacttttagaaatgactatgccccagaataattaaaaagagaaaccaaataatttttaaattaatttatacagagtttttcaccatcaagtttattttcagcacccatggggagttaatagatcttccctgaaagagaaaaacctttcctaaggaaaaatcctagaattcatatatttggcaacatttaaaggaggccatgaaatttttatcagtctagagaattgatctcctttaaggtgactctggtagttccaacgatgtttaaaggcatttcctgtaaaaaaaaaaaaaaaaagagagcgagagaaaaagagagagagagagagagaatttctgatgattaaaaaaaaaaagtgaggaatgctgagttaaacaaagttaaccacattctctcagagccttgaatgtgctaatatgtgctaatgtgtcttatggctctctaaggagggtgtagtcaaaatcatcttctacactgcttagttcccgggaacccactttttttttttttttattcatggtcgaatattatttattgtcagaaaggtacagcattcacaccaatatcagacaaaatagattttaactaaaaaattatttcgagacaaaaataacaatatatgttaataaaaggctcaattaaaaatgtataacaattataaacacatacacatcaaacaacagttccccaaaatacgtaaagcaaacattgacaggattgaagggagaaatagaccactctacaatagtagttggggtcttcaacaccccactttcaataattaatcacagccacttaaggaaccagtgcataccaaaacacacttctggcagtgttgcttcagggaattccgagtgtagggttaatgttccattttctctacctcttctaaaattcctccttcttcaaatggctattaataactttatatttttgtcctttgtgtcagttcttaattcatgttgcttataagcatgatttttattattaaagtgagatgggataaaaataaaatatttttgcaatgagataacgttttattttaattctcaccatttatatacaaacacaagtgaataaaacacatcgcaaaatggtaaaatttcatatttagtatttataggtgcatagtttcatgctcacatatttttaagtattatatatattaacaaatttcacaatacgtcattattcttagacagtatcattaaaagacacctaaaaatcttataatatatgatagcaaatcactaacaacttctgaacaacagcaacaaaaaaatagtgaggatttagaaataagtggtagtcacttaggtgtttttaatttgttttaacatcgtagattgaagccacaaaatccacagcacacaaagaccctgctaccatgtattcacttcagtgaaagggaagcaccgaaatgctgagtgggggcaggtacagatacttcaatcactgctgatggaagacttcgagatacactgtaaaaactttgagaaatgtcatgactgggcacattggaactgagcacttgtacaggatggaacatctgtcagcagatctcaagaaactgggagcaaagatatttcttaggcttcaggttcgtagtcttgatacccttccttgcccaactggtcctttttgacaaagccagtggctgctgcaatgctccctgctccctccactgtcttctgggctactgctgtcacacccgtcaccactgctcctccaacatttgtcacttgctctttggtcttctcagccactgttgccacaccatgcaccactccctccttggttttggagcctacatagagaacaccctcttttgtctttcctgctgcttctgccacaccctgtttggttttctcagcagcagccacaactccctccttggcctttgaaagtcctttcatgaatacatccatggctaatgaattcctttacaccacactgagtccctctgcttctccacaactccgactcctccccgcctctctctttttttaaaaaaaaaatttaaacaattcccaaataatatttaataggaaagaagaaggaaaaggagcgcacaggaagggcggaggcggcacccgggggggactgtccccagaggaggccgctgtgagccggcgacgcgaggctgggggagtgggaggcaaacccgctaacctgtcgtcgaatggccactcccagttctccgctcacgagggtggaaaggcagaaggcttgaaggcaaggcgtgagggagcgcccaggacgctctcggaggggccgggccggggtctgcgctgcagcccgcacgcacctcacttccgcgtcgcggcgctcggtcgctcgccccctctcttgggccccttctggtcgtcgcc

SEQ ID NO: 3 - DNA, 2955 bp, Macaca fascicularis
  source 1..2955: mol_type = other DNA
gccttgcgcggccaggcaggcggctggaattggtggttcaccctgcgccccctgccccatccccatccgagatagggaacgaagagcacgctgcagggaaagcagcgagcgctgggaggggagcgtggagaggcgctgacaaatcagcggtgggggcggagagccgaggagaaggagaaggaggaggacgaggaggaggaggacggcgacgaccagaaggggcccgagagagggggcgagcgaccgagcgccgcgacgcgggagtgagtgtggtgtaaaggaattcattagccatggatgtattcatgaaaggactttcaaaggccaaggagggagttgtggctgctgctgagaaaaccaaacagggtgtggcagaagcagcaggaaagacaaaagagggtgttctctatgtaggctccaaaaccaaggagggagtggtgcacggtgtggcaacagtggctgagaagaccaaagagcaagtgacaaatgttggaggagcggtggtgacgggtgtgacagcagtagcccagaagacagtggagggagcagggagcattgcagcagccactggcttcatcaaaaaggaccagttgggcaagaatgaagaaggagccccacaggaaggaattctacaagatatgcctgtggatcctgacaatgaggcttatgaaatgccttctgaggaagggtatcaagactacgaacctgaagcctaagaaatatctttgctcccagtttcttgagatctgctgacagacgttccatcttgtacaagtgctcagttccaatgtgcccagtcatgacatttctcaaagtttttacagtatattttgaagtcttccatcagcagtgattgaagtatctgtacctgcccccattcagcatttcggtgcttccctttcactgaagtgaatacatggtagcagggtctttgtgtgctgtggattttgtggcttcaatctatgatgttaaaacaatttaaaaacacctaagtgactaccacttatttctaaatcctcactatttttttgttgctgttgttcagaagttgttagtgatttgctatcgtatattataagatttttaggtgtcttttaatgatactgtctaagaataatgatgtattgtgaaatttgttaatatatataatacttaaaagtatgtgagcatgaaactatgcacctataaatactaactatgaaattttaccgttttgtgatgtgttttattaacttgtgtttgtatataaatggtgagaattaaaataaaatgtcgtctcattgcaaacaaaaatttatttttatcccatctcactttaataataaaaatcttgcttataagcaacatgcattgagaactgacacaatggacataaagttattaataggcatttgaagaaggaggaattttagaagaggtagagaaaatggaacattaaccctacactgggaattccctgaagcagcactgccagaagtgtgttttgtggtgccttaagtggctgtgataaaaaaaaaaaaaagtgggctccagggaacgaagcagtgtaaaagatgattttgactacatcctccttagagatccatgagacactttagcacatattagcacattcaaggctctgagacaatgtggttaacttagtttaactcagcagtccccactaaaaaaaaaaaaatcatcaaaaattctctctctctattcctttttctctcgctccccttttttccaggaaatgcctttaaacacctttgggaactatcaggatcaccttaaagaagatcagttctccagactgataaaaatttcatgatctcttttaaatgttgccaaatatatgaattctaggatttttccttgggaaaggtttttctctttcagggaagatctattaactccccatgggtgctgaaaataaacttgatggtgaaaaattctatataaattaatttaaaatttttttggtttctctttttaattattctggggcatagtcatttttaaaagtcactagtagaaagtataatttcaagacagaatattctagacatgctagcagtttatatgtattcatgagtaatgtgatatatattgggcactggtgaggcaggaaggaggaatgagtgactataaggatggttaccatagaaacttccttttttacctaattgaaaagcgactactacagagtgctaagctgcatgtgtcatcttacactggagagaaatggtaagtttcttgttttatttaagttatgtttaagcaaggaaaggattttttattgaacagtatatttcaggaaggttagaaaatagctgttaggatatattttaaatctacctaaagcagcatattttaaaaaattagaagtattggcattaaatgaagaaatagaggacaaaactagactgacagcaatgacccagaacattttgagattagtaaagttgtgaccatgaatttagggatttatgtggatacaaattctcctttaaagtgtttcttcccttaatatttatctggtagttatttatgagcagtgaattattttgtagtttatatatcttaatagtttatttgggaccaagcacttaacaaaaagttctataagtcatagaagccttttcaggaagcttgtctcacattcattcctgagactttcacctgccaagtggcctgaggatcaatccggtcctaggtttattttgcagacatacattctcccaagttattcagcctcatatgactccacagtgggctttaccaaaacagttcagagtgcactttggcacacaattgggagcagaacaatctaatgtgtggtttggtattccaagtggggtctttttcagaatctctccactagtgtgagatgcaaatatgtttcctcatttttctggctcatccagtatgtagctttttgtgacataataaatatatacatatatgaaaata

SEQ ID NO: 4 - DNA, 2955 bp, Macaca fascicularis
  source 1..2955: mol_type = other DNA
tattttcatatatgtatatatttattatgtcacaaaaagctacatactggatgagccagaaaaatgaggaaacatatttgcatctcacactagtggagagattctgaaaaagaccccacttggaataccaaaccacacattagattgttctgctcccaattgtgtgccaaagtgcactctgaactgttttggtaaagcccactgtggagtcatatgaggctgaataacttgggagaatgtatgtctgcaaaataaacctaggaccggattgatcctcaggccacttggcaggtgaaagtctcaggaatgaatgtgagacaagcttcctgaaaaggcttctatgacttatagaactttttgttaagtgcttggtcccaaataaactattaagatatataaactacaaaataattcactgctcataaataactaccagataaatattaagggaagaaacactttaaaggagaatttgtatccacataaatccctaaattcatggtcacaactttactaatctcaaaatgttctgggtcattgctgtcagtctagttttgtcctctatttcttcatttaatgccaatacttctaattttttaaaatatgctgctttaggtagatttaaaatatatcctaacagctattttctaaccttcctgaaatatactgttcaataaaaaatcctttccttgcttaaacataacttaaataaaacaagaaacttaccatttctctccagtgtaagatgacacatgcagcttagcactctgtagtagtcgcttttcaattaggtaaaaaaggaagtttctatggtaaccatccttatagtcactcattcctccttcctgcctcaccagtgcccaatatatatcacattactcatgaatacatataaactgctagcatgtctagaatattctgtcttgaaattatactttctactagtgacttttaaaaatgactatgccccagaataattaaaaagagaaaccaaaaaaattttaaattaatttatatagaatttttcaccatcaagtttattttcagcacccatggggagttaatagatcttccctgaaagagaaaaacctttcccaaggaaaaatcctagaattcatatatttggcaacatttaaaagagatcatgaaatttttatcagtctggagaactgatcttctttaaggtgatcctgatagttcccaaaggtgtttaaaggcatttcctggaaaaaaggggagcgagagaaaaaggaatagagagagagaatttttgatgatttttttttttttagtggggactgctgagttaaactaagttaaccacattgtctcagagccttgaatgtgctaatatgtgctaaagtgtctcatggatctctaaggaggatgtagtcaaaatcatcttttacactgcttcgttccctggagcccacttttttttttttttatcacagccacttaaggcaccacaaaacacacttctggcagtgctgcttcagggaattcccagtgtagggttaatgttccattttctctacctcttctaaaattcctccttcttcaaatgcctattaataactttatgtccattgtgtcagttctcaatgcatgttgcttataagcaagatttttattattaaagtgagatgggataaaaataaatttttgtttgcaatgagacgacattttattttaattctcaccatttatatacaaacacaagttaataaaacacatcacaaaacggtaaaatttcatagttagtatttataggtgcatagtttcatgctcacatacttttaagtattatatatattaacaaatttcacaatacatcattattcttagacagtatcattaaaagacacctaaaaatcttataatatacgatagcaaatcactaacaacttctgaacaacagcaacaaaaaaatagtgaggatttagaaataagtggtagtcacttaggtgtttttaaattgttttaacatcatagattgaagccacaaaatccacagcacacaaagaccctgctaccatgtattcacttcagtgaaagggaagcaccgaaatgctgaatgggggcaggtacagatacttcaatcactgctgatggaagacttcaaaatatactgtaaaaactttgagaaatgtcatgactgggcacattggaactgagcacttgtacaagatggaacgtctgtcagcagatctcaagaaactgggagcaaagatatttcttaggcttcaggttcgtagtcttgatacccttcctcagaaggcatttcataagcctcattgtcaggatccacaggcatatcttgtagaattccttcctgtggggctccttcttcattcttgcccaactggtcctttttgatgaagccagtggctgctgcaatgctccctgctccctccactgtcttctgggctactgctgtcacacccgtcaccaccgctcctccaacatttgtcacttgctctttggtcttctcagccactgttgccacaccgtgcaccactccctccttggttttggagcctacatagagaacaccctcttttgtctttcctgctgcttctgccacaccctgtttggttttctcagcagcagccacaactccctccttggcctttgaaagtcctttcatgaatacatccatggctaatgaattcctttacaccacactcactcccgcgtcgcggcgctcggtcgctcgccccctctctcgggccccttctggtcgtcgccgtcctcctcctcctcgtcctcctccttctccttctcctcggctctccgcccccaccgctgatttgtcagcgcctctccacgctcccctcccagcgctcgctgctttccctgcagcgtgctcttcgttccctatctcggatggggatggggcagggggcgcagggtgaaccaccaattccagccgcctgcctggccgcgcaaggc

SEQ ID NO: 5 - DNA, 1208 bp, Mus musculus
  source 1..1208: mol_type = other DNA
ggaggagcttggcactcaaatccactctgctataaaacagtggtattctgctcatctcagagagaagtgggaacgtgttaagtaacacagaaattgtctcaaagcctgtgcatctatctgcgcgtgtgcttggattggaagaagagtctgttcgctggagctccacgcagccagaagtcggaaagtgtggagcaaaaatacatctttagccatggatgtgttcatgaaaggactttcaaaggccaaggagggagttgtggctgctgctgagaaaaccaagcagggtgtggcagaggcagctggaaagacaaaagagggagtcctctatgtaggttccaaaactaaggaaggagtggttcatggagtgacaacagtggctgagaagaccaaagagcaagtgacaaatgttggaggagcagtggtgactggtgtgacagcagtcgctcagaagacagtggagggagctgggaatatagctgctgccactggctttgtcaagaaggaccagatgggcaagggtgaggaggggtacccacaggaaggaatcctggaagacatgcctgtggatcctggcagtgaggcttatgaaatgccttcagaggaaggctaccaagactatgagcctgaagcctaagaatgtcattgcacccaatctcctaagatctgccggctgctcttccatggcgtacaagtgctcagttccaatgtgcccagtcatgaccttttctcaaagctgtacagtgtgtttcaaagtcttccatcagcagtgatcggcgtcctgtacctgcccctcagcatcccggtgctcccctctcactacagtgaaaacctggtagcagggtcttgtgtgctgtggatattgttgtggcttcacacttaaattgttagaagaaacttaaaacacctaagtgactaccacttatttctaaatcttcatcgttttctttttgttgctgttcttaagaagttgtgatttgctccaagagttttaggtgtcctgaatgactctttctgtctaagaatgatgtgttgtgaaatttgttaatatatattttaaaattatgtgagcatgagactatgcacctataaatattaatttatgaattttacagttttgtgatgtgttttattaacttgtgtttgtatataaatggtggaaaataaaataaaatattatccattgcaaaatcaaaaaaaaaaaaaaaaaa

SEQ ID NO: 6 - DNA, 1208 bp, Mus musculus
  source 1..1208: mol_type = other DNA
ttttttttttttttttttgattttgcaatggataatattttattttattttccaccatttatatacaaacacaagttaataaaacacatcacaaaactgtaaaattcataaattaatatttataggtgcatagtctcatgctcacataattttaaaatatatattaacaaatttcacaacacatcattcttagacagaaagagtcattcaggacacctaaaactcttggagcaaatcacaacttcttaagaacagcaacaaaaagaaaacgatgaagatttagaaataagtggtagtcacttaggtgttttaagtttcttctaacaatttaagtgtgaagccacaacaatatccacagcacacaagaccctgctaccaggttttcactgtagtgagaggggagcaccgggatgctgaggggcaggtacaggacgccgatcactgctgatggaagactttgaaacacactgtacagctttgagaaaaggtcatgactgggcacattggaactgagcacttgtacgccatggaagagcagccggcagatcttaggagattgggtgcaatgacattcttaggcttcaggctcatagtcttggtagccttcctctgaaggcatttcataagcctcactgccaggatccacaggcatgtcttccaggattccttcctgtgggtacccctcctcacccttgcccatctggtccttcttgacaaagccagtggcagcagctatattcccagctccctccactgtcttctgagcgactgctgtcacaccagtcaccactgctcctccaacatttgtcacttgctctttggtcttctcagccactgttgtcactccatgaaccactccttccttagttttggaacctacatagaggactccctcttttgtctttccagctgcctctgccacaccctgcttggttttctcagcagcagccacaactccctccttggcctttgaaagtcctttcatgaacacatccatggctaaagatgtatttttgctccacactttccgacttctggctgcgtggagctccagcgaacagactcttcttccaatccaagcacacgcgcagatagatgcacaggctttgagacaatttctgtgttacttaacacgttcccacttctctctgagatgagcagaataccactgttttatagcagagtggatttgagtgccaagctcctcc

SEQ ID NO: 7 - DNA, 1176 bp, Rattus norvegicus
  source 1..1176: mol_type = other DNA
ccggcagcagacggcaggagaccagcaggtgctccccctgcccttgcccctcagcccagagcctttcacccctcttgcattgaaattagattggggaaaacaggaggaatcagagttctgcggaagcctagagagccgtgtggagcaaagatacatctttagccatggatgtgttcatgaaaggactttcaaaggccaaggagggagttgtggctgctgctgagaaaaccaagcagggtgtggcagaggcagctgggaagacaaaagagggcgtcctctatgtaggttccaaaactaaggagggagtcgttcatggagtgacaacagtggctgagaagaccaaagaacaagtgacaaatgttggaggggcagtggtgactggtgtgacagcagtcgctcagaagacagtggagggagctgggaacattgctgctgccactggttttgtcaagaaggaccagatgggcaagggtgaagaagggtacccacaagagggaatcctggaagacatgcctgtggaccctagcagtgaggcttatgaaatgccttcagaggaaggctaccaagactatgagcctgaagcctaagaatgtcgttgtacccactgtcctaagatctgcccaggtgttcttccatggcgtacaagtgctcagttccaacgtgcccagtcatgaccttttctcaaagctgtacagtgtatttcaaagtcttccatcagcagtgatcggagtcctgtacctgcccctcagcatcccggtgctcccctctcactacagtgaatacatggtagcaggctcttgtgtgctgtggatattgttgtggcttcaaacctaaaatgttagaagaaacttaaaacacctaagtgactaccacttatttctaactcttcaccgttttttgttgctgttctcaagaagttgtgatttgctataagacttttagatgtccttaatgattctttctgtctaagaagaatgatgtgctgtgaaatttgttaatatatattttaaaatatgtgagcatgagactatgcacctataaatattaatttatgaattttacagttttgtgacgtgttttattaacttgtgtttgtatataaatggtggaaattaaaataaaataaaacattatctcattgcaaaaccttaaaaaaaaaaaaaaaaaaaaaaaagg

SEQ ID NO: 8 - DNA, 1176 bp, Rattus norvegicus
  source 1..1176: mol_type = other DNA
ccttttttttttttttttttttttttaaggttttgcaatgagataatgttttattttattttaatttccaccatttatatacaaacacaagttaataaaacacgtcacaaaactgtaaaattcataaattaatatttataggtgcatagtctcatgctcacatattttaaaatatatattaacaaatttcacagcacatcattcttcttagacagaaagaatcattaaggacatctaaaagtcttatagcaaatcacaacttcttgagaacagcaacaaaaaacggtgaagagttagaaataagtggtagtcacttaggtgttttaagtttcttctaacattttaggtttgaagccacaacaatatccacagcacacaagagcctgctaccatgtattcactgtagtgagaggggagcaccgggatgctgaggggcaggtacaggactccgatcactgctgatggaagactttgaaatacactgtacagctttgagaaaaggtcatgactgggcacgttggaactgagcacttgtacgccatggaagaacacctgggcagatcttaggacagtgggtacaacgacattcttaggcttcaggctcatagtcttggtagccttcctctgaaggcatttcataagcctcactgctagggtccacaggcatgtcttccaggattccctcttgtgggtacccttcttcacccttgcccatctggtccttcttgacaaaaccagtggcagcagcaatgttcccagctccctccactgtcttctgagcgactgctgtcacaccagtcaccactgcccctccaacatttgtcacttgttctttggtcttctcagccactgttgtcactccatgaacgactccctccttagttttggaacctacatagaggacgccctcttttgtcttcccagctgcctctgccacaccctgcttggttttctcagcagcagccacaactccctccttggcctttgaaagtcctttcatgaacacatccatggctaaagatgtatctttgctccacacggctctctaggcttccgcagaactctgattcctcctgttttccccaatctaatttcaatgcaagaggggtgaaaggctctgggctgaggggcaagggcagggggagcacctgctggtctcctgccgtctgctgccgg

SEQ ID NO: 9 - protein, 16 aa, synthetic construct
AAVALLPAVLLALLAP

SEQ ID NO: 10 - protein, 11 aa, synthetic construct
AALLPVLLAAP

SEQ ID NO: 11 - protein, 13 aa, synthetic construct
GRKKRRQRRRPPQ

SEQ ID NO: 12 - protein, 16 aa, synthetic construct
RQIKIWFQNRRMKWKK

SEQ ID NO: 13 - RNA, 21 nt, synthetic construct
  source 1..21: mol_type = other RNA
  modified_base 1: mod_base = OTHER; note = 2'-O-methylguanosine-3'-phosphorothioate
  modified_base 2: mod_base = OTHER; note = 2'-O-methyluridine-3'-phosphorothioate
  modified_base 3: mod_base = OTHER; note = 2'-O-methylguanosine-3'-phosphate
  modified_base 4: mod_base = OTHER; note = 2'-O-methyluridine-3'-phosphate
  modified_base 5: mod_base = OTHER; note = 2'-O-methylguanosine-3'-phosphate
  modified_base 6: mod_base = OTHER; note = 2'-O-hexadecyl-guanosine-3'-phosphate
  modified_base 7: mod_base = OTHER; note = 2'-deoxy-2'-fluorouridine-3'-phosphate
  modified_base 8: mod_base = OTHER; note = 2'-O-methylguanosine-3'-phosphate
  modified_base 9: mod_base = OTHER; note = 2'-deoxy-2'-fluorouridine-3'-phosphate
  modified_base 10: mod_base = OTHER; note = 2'-deoxy-2'-fluoroadenosine-3'-phosphate
  modified_base 11: mod_base = OTHER; note = 2'-deoxy-2'-fluoroadenosine-3'-phosphate
  modified_base 12: mod_base = OTHER; note = 2'-O-methyladenosine-3'-phosphate
  modified_base 13: mod_base = OTHER; note = 2'-O-methylguanosine-3'-phosphate
  modified_base 14: mod_base = OTHER; note = 2'-O-methylguanosine-3'-phosphate
  modified_base 15: mod_base = OTHER; note = 2'-O-methyladenosine-3'-phosphate
  modified_base 16: mod_base = OTHER; note = 2'-O-methyladenosine-3'-phosphate
  modified_base 17: mod_base = OTHER; note = 2'-O-methyluridine-3'-phosphate
  modified_base 18: mod_base = OTHER; note = 2'-O-methyluridine-3'-phosphate
  modified_base 19: mod_base = OTHER; note = 2'-O-methylcytidine-3'-phosphorothioate
  modified_base 20: mod_base = OTHER; note = 2'-O-methyladenosine-3'-phosphorothioate
  modified_base 21: mod_base = OTHER; note = 2'-O-methyladenosine
gtgtggtgtaaaggaattcaa

SEQ ID NO: 14 - RNA, 21 nt, synthetic construct
  source 1..21: mol_type = other RNA
  modified_base 1: mod_base = OTHER; note = 2'-O-methyluridine-3'-phosphorothioate
  modified_base 2: mod_base = OTHER; note = 2'-O-methylguanosine-3'-phosphorothioate
  modified_base 3: mod_base = OTHER; note = 2'-O-methyluridine-3'-phosphate
  modified_base 4: mod_base = OTHER; note = 2'-O-methylguanosine-3'-phosphate
  modified_base 5: mod_base = OTHER; note = 2'-O-methylguanosine-3'-phosphate
  modified_base 6: mod_base = OTHER; note = 2'-O-hexadecyl-uridine-3'-phosphate
  modified_base 7: mod_base = OTHER; note = 2'-O-methylguanosine-3'-phosphate
  modified_base 8: mod_base = OTHER; note = 2'-O-methyluridine-3'-phosphate
  modified_base 9: mod_base = OTHER; note = 2'-deoxy-2'-fluoroadenosine-3'-phosphate
  modified_base 10: mod_base = OTHER; note = 2'-deoxy-2'-fluoroadenosine-3'-phosphate
  modified_base 11: mod_base = OTHER; note = 2'-deoxy-2'-fluoroadenosine-3'-phosphate
  modified_base 12: mod_base = OTHER; note = 2'-O-methylguanosine-3'-phosphate
  modified_base 13: mod_base = OTHER; note = 2'-O-methylguanosine-3'-phosphate
  modified_base 14: mod_base = OTHER; note = 2'-O-methyladenosine-3'-phosphate
  modified_base 15: mod_base = OTHER; note = 2'-O-methyladenosine-3'-phosphate
  modified_base 16: mod_base = OTHER; note = 2'-O-methyluridine-3'-phosphate
  modified_base 17: mod_base = OTHER; note = 2'-O-methyluridine-3'-phosphate
  modified_base 18: mod_base = OTHER; note = 2'-O-methylcytidine-3'-phosphate
  modified_base 19: mod_base = OTHER; note = 2'-O-methyladenosine-3'-phosphorothioate
  modified_base 20: mod_base = OTHER; note = 2'-O-methyluridine-3'-phosphorothioate
  modified_base 21: mod_base = OTHER; note = 2'-O-methyladenosine
tgtggtgtaaaggaattcata

SEQ ID NO: 15 - RNA, 21 nt, synthetic construct
  source 1..21: mol_type = other RNA
  modified_base 1: mod_base = OTHER; note = 2'-O-methylguanosine-3'-phosphorothioate
  modified_base 2: mod_base = OTHER; note = 2'-O-methylguanosine-3'-phosphorothioate
  modified_base 3: mod_base = OTHER; note = 2'-O-methyluridine-3'-phosphate
  modified_base 4: mod_base = OTHER; note = 2'-O-methylguanosine-3'-phosphate
  modified_base 5: mod_base = OTHER; note = 2'-O-methyluridine-3'-phosphate
  modified_base 6: mod_base = OTHER; note = 2'-O-hexadecyl-adenosine-3'-phosphate
  modified_base 7: mod_base = OTHER; note = 2'-O-methyladenosine-3'-phosphate
  modified_base 8: mod_base = OTHER; note = 2'-O-methyladenosine-3'-phosphate
  modified_base 9: mod_base = OTHER; note = 2'-deoxy-2'-fluoroguanosine-3'-phosphate
  modified_base 10: mod_base = OTHER; note = 2'-deoxy-2'-fluoroguanosine-3'-phosphate
  modified_base 11: mod_base = OTHER; note = 2'-deoxy-2'-fluoroadenosine-3'-phosphate
  modified_base 12: mod_base = OTHER; note = 2'-O-methyladenosine-3'-phosphate
  modified_base 13: mod_base = OTHER; note = 2'-O-methyluridine-3'-phosphate
  modified_base 14: mod_base = OTHER; note = 2'-O-methyluridine-3'-phosphate
  modified_base 15: mod_base = OTHER; note = 2'-O-methylcytidine-3'-phosphate
  modified_base 16: mod_base = OTHER; note = 2'-O-methyladenosine-3'-phosphate
  modified_base 17: mod_base = OTHER; note = 2'-O-methyluridine-3'-phosphate
  modified_base 18: mod_base = OTHER; note = 2'-O-methyluridine-3'-phosphate
  modified_base 19: mod_base = OTHER; note = 2'-O-methyladenosine-3'-phosphorothioate
  modified_base 20: mod_base = OTHER; note = 2'-O-methylguanosine-3'-phosphorothioate
  modified_base 21: mod_base = OTHER; note = 2'-O-methyladenosine
ggtgtaaaggaattcattaga

SEQ ID NO: 16 - RNA, 21 nt, synthetic construct
  source 1..21: mol_type = other RNA
  modified_base 1: mod_base = OTHER; note = 2'-O-methyladenosine-3'-phosphorothioate
  modified_base 2: mod_base = OTHER; note = 2'-O-methyluridine-3'-phosphorothioate
  modified_base 3: mod_base = OTHER; note = 2'-O-methyluridine-3'-phosphate
  modified_base 4: mod_base = OTHER; note = 2'-O-methyladenosine-3'-phosphate
  modified_base 5: mod_base = OTHER; note = 2'-O-methylguanosine-3'-phosphate
  modified_base 6: mod_base = OTHER; note = 2'-O-hexadecyl-cytidine-3'-phosphate
  modified_base 7: mod_base = OTHER; note = 2'-O-methylcytidine-3'-phosphate
  modified_base 8: mod_base = OTHER; note = 2'-O-methyladenosine-3'-phosphate
  modified_base 9: mod_base = OTHER; note = 2'-deoxy-2'-fluorouridine-3'-phosphate
  modified_base 10: mod_base = OTHER; note = 2'-deoxy-2'-fluoroguanosine-3'-phosphate
  modified_base 11: mod_base = OTHER; note = 2'-deoxy-2'-fluoroguanosine-3'-phosphate
  modified_base 12: mod_base = OTHER; note = 2'-O-methyladenosine-3'-phosphate
  modified_base 13: mod_base = OTHER; note = 2'-O-methyluridine-3'-phosphate
  modified_base 14: mod_base = OTHER; note = 2'-O-methylguanosine-3'-phosphate
  modified_base 15: mod_base = OTHER; note = 2'-O-methyluridine-3'-phosphate
  modified_base 16: mod_base = OTHER; note = 2'-O-methyladenosine-3'-phosphate
  modified_base 17: mod_base = OTHER; note = 2'-O-methyluridine-3'-phosphate
  modified_base 18: mod_base = OTHER; note = 2'-O-methyluridine-3'-phosphate
  modified_base 19: mod_base = OTHER; note = 2'-O-methylcytidine-3'-phosphorothioate
  modified_base 20: mod_base = OTHER; note = 2'-O-methyladenosine-3'-phosphorothioate
  modified_base 21: mod_base = OTHER; note = 2'-O-methyladenosine
attagccatggatgtattcaa

SEQ ID NO: 17 - RNA, 21 nt, synthetic construct
  source 1..21: mol_type = other RNA
  modified_base 1: mod_base = OTHER; note = 2'-O-methyluridine-3'-phosphorothioate
  modified_base 2: mod_base = OTHER; note = 2'-O-methyluridine-3'-phosphorothioate
  modified_base 3: mod_base = OTHER; note = 2'-O-methyladenosine-3'-phosphate
  modified_base 4: mod_base = OTHER; note = 2'-O-methylguanosine-3'-phosphate
  modified_base 5: mod_base = OTHER; note = 2'-O-methylcytidine-3'-phosphate
  modified_base 6: mod_base = OTHER; note = 2'-O-hexadecyl-cytidine-3'-phosphate
  modified_base 7: mod_base = OTHER; note = 2'-O-methyladenosine-3'-phosphate
  modified_base 8: mod_base = OTHER; note = 2'-O-methyluridine-3'-phosphate
  modified_base 9: mod_base = OTHER; note = 2'-deoxy-2'-fluoroguanosine-3'-phosphate
  modified_base 10: mod_base = OTHER; note = 2'-deoxy-2'-fluoroguanosine-3'-phosphate
  modified_base 11: mod_base = OTHER; note = 2'-deoxy-2'-fluoroadenosine-3'-phosphate
  modified_base 12: mod_base = OTHER; note = 2'-O-methyluridine-3'-phosphate
  modified_base 13: mod_base = OTHER; note = 2'-O-methylguanosine-3'-phosphate
  modified_base 14: mod_base = OTHER; note = 2'-O-methyluridine-3'-phosphate
  modified_base 15: mod_base = OTHER; note = 2'-O-methyladenosine-3'-phosphate
  modified_base 16: mod_base = OTHER; note = 2'-O-methyluridine-3'-phosphate
  modified_base 17: mod_base = OTHER; note = 2'-O-methyluridine-3'-phosphate
  modified_base 18: mod_base = OTHER; note = 2'-O-methylcytidine-3'-phosphate
  modified_base 19: mod_base = OTHER; note = 2'-O-methyladenosine-3'-phosphorothioate
  modified_base 20: mod_base = OTHER; note = 2'-O-methyluridine-3'-phosphorothioate
  modified_base 21: mod_base = OTHER; note = 2'-O-methyladenosine
ttagccatggatgtattcata

SEQ ID NO: 18 - RNA, 21 nt, synthetic construct
  source 1..21: mol_type = other RNA
  modified_base 1: mod_base = OTHER; note = 2'-O-methyladenosine-3'-phosphorothioate
  modified_base 2: mod_base = OTHER; note = 2'-O-methyluridine-3'-phosphorothioate
  modified_base 3: mod_base = OTHER; note = 2'-O-methyluridine-3'-phosphate
  modified_base 4: mod_base = OTHER; note = 2'-O-methylcytidine-3'-phosphate
  modified_base 5: mod_base = OTHER; note = 2'-O-methyladenosine-3'-phosphate
  modified_base 6: mod_base = OTHER; note = 2'-O-hexadecyl-uridine-3'-phosphate
  modified_base 7: mod_base = OTHER; note = 2'-O-methylguanosine-3'-phosphate
  modified_base 8: mod_base = OTHER; note = 2'-O-methyladenosine-3'-phosphate
  modified_base 9: mod_base = OTHER; note = 2'-deoxy-2'-fluoroadenosine-3'-phosphate
  modified_base 10: mod_base = OTHER; note = 2'-deoxy-2'-fluoroadenosine-3'-phosphate
  modified_base 11: mod_base = OTHER; note = 2'-deoxy-2'-fluoroguanosine-3'-phosphate
  modified_base 12: mod_base = OTHER; note = 2'-O-methylguanosine-3'-phosphate
  modified_base 13: mod_base = OTHER; note = 2'-O-methyladenosine-3'-phosphate
  modified_base 14: mod_base = OTHER; note = 2'-O-methylcytidine-3'-phosphate
  modified_base 15: mod_base = OTHER; note = 2'-O-methyluridine-3'-phosphate
  modified_base 16: mod_base = OTHER; note = 2'-O-methyluridine-3'-phosphate
  modified_base 17: mod_base = OTHER; note = 2'-O-methyluridine-3'-phosphate
  modified_base 18: mod_base = OTHER; note = 2'-O-methylcytidine-3'-phosphate
  modified_base 19: mod_base = OTHER; note = 2'-O-methyladenosine-3'-phosphorothioate
  modified_base 20: mod_base = OTHER; note = 2'-O-methyladenosine-3'-phosphorothioate
  modified_base 21: mod_base = OTHER; note = 2'-O-methyladenosine
attcatgaaaggactttcaaa

SEQ ID NO: 19 - RNA, 21 nt, synthetic construct
  source 1..21: mol_type = other RNA
  modified_base 1: mod_base = OTHER; note = 2'-O-methyluridine-3'-phosphorothioate
  modified_base 2: mod_base = OTHER; note = 2'-O-methylcytidine-3'-phosphorothioate
  modified_base 3: mod_base = OTHER; note = 2'-O-methyladenosine-3'-phosphate
  modified_base 4: mod_base = OTHER; note = 2'-O-methyluridine-3'-phosphate
  modified_base 5: mod_base = OTHER; note = 2'-O-methylguanosine-3'-phosphate
  modified_base 6: mod_base = OTHER; note = 2'-O-hexadecyl-adenosine-3'-phosphate
  modified_base 7: mod_base = OTHER; note = 2'-O-methyladenosine-3'-phosphate
  modified_base 8: mod_base = OTHER; note = 2'-O-methyladenosine-3'-phosphate
  modified_base 9: mod_base = OTHER; note = 2'-deoxy-2'-fluoroguanosine-3'-phosphate
  modified_base 10: mod_base = OTHER; note = 2'-deoxy-2'-fluoroguanosine-3'-phosphate
  modified_base 11: mod_base = OTHER; note = 2'-deoxy-2'-fluoroadenosine-3'-phosphate
  modified_base 12: mod_base = OTHER; note = 2'-O-methylcytidine-3'-phosphate
  modified_base 13: mod_base = OTHER; note = 2'-O-methyluridine-3'-phosphate
  modified_base 14: mod_base = OTHER; note = 2'-O-methyluridine-3'-phosphate
  modified_base 15: mod_base = OTHER; note = 2'-O-methyluridine-3'-phosphate
  modified_base 16: mod_base = OTHER; note = 2'-O-methylcytidine-3'-phosphate
  modified_base 17: mod_base = OTHER; note = 2'-O-methyladenosine-3'-phosphate
  modified_base 18: mod_base = OTHER; note = 2'-O-methyladenosine-3'-phosphate
  modified_base 19: mod_base = OTHER; note = 2'-O-methyladenosine-3'-phosphorothioate
  modified_base 20: mod_base = OTHER; note = 2'-O-methylguanosine-3'-phosphorothioate
  modified_base 21: mod_base = OTHER; note = 2'-O-methyladenosine
tcatgaaaggactttcaaaga

SEQ ID NO: 20 - RNA, 21 nt, synthetic construct
  source 1..21: mol_type = other RNA
  modified_base 1: mod_base = OTHER; note = 2'-O-methyladenosine-3'-phosphorothioate
  modified_base 2: mod_base = OTHER; note = 2'-O-methyladenosine-3'-phosphorothioate
  modified_base 3: mod_base = OTHER; note = 2'-O-methylguanosine-3'-phosphate
  modified_base 4: mod_base = OTHER; note = 2'-O-methyladenosine-3'-phosphate
  modified_base 5: mod_base = OTHER; note = 2'-O-methylguanosine-3'-phosphate
  modified_base 6: mod_base = OTHER; note = 2'-O-hexadecyl-cytidine-3'-phosphate
  modified_base 7: mod_base = OTHER; note = 2'-O-methyladenosine-3'-phosphate
  modified_base 8: mod_base = OTHER; note = 2'-O-methyladenosine-3'-phosphate
  modified_base 9: mod_base = OTHER; note = 2'-deoxy-2'-fluoroguanosine-3'-phosphate
  modified_base 10: mod_base = OTHER; note = 2'-deoxy-2'-fluorouridine-3'-phosphate
  modified_base 11: mod_base = OTHER; note = 2'-deoxy-2'-fluoroguanosine-3'-phosphate
  modified_base 12: mod_base = OTHER; note = 2'-O-methyladenosine-3'-phosphate
  modified_base 13: mod_base = OTHER; note = 2'-O-methylcytidine-3'-phosphate
  modified_base 14: mod_base = OTHER; note = 2'-O-methyladenosine-3'-phosphate
  modified_base 15: mod_base = OTHER; note = 2'-O-methyladenosine-3'-phosphate
  modified_base 16: mod_base = OTHER; note = 2'-O-methyladenosine-3'-phosphate
  modified_base 17: mod_base = OTHER; note = 2'-O-methyluridine-3'-phosphate
  modified_base 18: mod_base = OTHER; note = 2'-O-methylguanosine-3'-phosphate
  modified_base 19: mod_base = OTHER; note = 2'-O-methyluridine-3'-phosphorothioate
  modified_base 20: mod_base = OTHER; note = 2'-O-methyluridine-3'-phosphorothioate
  modified_base 21: mod_base = OTHER; note = 2'-O-methyladenosine
aagagcaagtgacaaatgtta

SEQ ID NO: 21 - RNA, 21 nt, synthetic construct
  source 1..21: mol_type = other RNA
  modified_base 1: mod_base = OTHER; note = 2'-O-methylguanosine-3'-phosphorothioate
  modified_base 2: mod_base = OTHER; note = 2'-O-methyladenosine-3'-phosphorothioate
  modified_base 3: mod_base = OTHER; note = 2'-O-methylguanosine-3'-phosphate
  modified_base 4: mod_base = OTHER; note = 2'-O-methylcytidine-3'-phosphate
  modified_base 5: mod_base = OTHER; note = 2'-O-methyladenosine-3'-phosphate
  modified_base 6: mod_base = OTHER; note = 2'-O-hexadecyl-adenosine-3'-phosphate
  modified_base 7: mod_base = OTHER; note = 2'-O-methylguanosine-3'-phosphate
  modified_base 8: mod_base = OTHER; note = 2'-O-methyluridine-3'-phosphate
  modified_base 9: mod_base = OTHER; note = 2'-deoxy-2'-fluoroguanosine-3'-phosphate
  modified_base 10: mod_base = OTHER; note = 2'-deoxy-2'-fluoroadenosine-3'-phosphate
  modified_base 11: mod_base = OTHER; note = 2'-deoxy-2'-fluorocytidine-3'-phosphate
  modified_base 12: mod_base = OTHER; note = 2'-O-methyladenosine-3'-phosphate
  modified_base 13: mod_base = OTHER; note = 2'-O-methyladenosine-3'-phosphate
  modified_base 14: mod_base = OTHER; note = 2'-O-methyladenosine-3'-phosphate
  modified_base 15: mod_base = OTHER; note = 2'-O-methyluridine-3'-phosphate
  modified_base 16: mod_base = OTHER; note = 2'-O-methylguanosine-3'-phosphate
  modified_base 17: mod_base = OTHER; note = 2'-O-methyluridine-3'-phosphate
  modified_base 18: mod_base = OTHER; note = 2'-O-methyluridine-3'-phosphate
  modified_base 19: mod_base = OTHER; note = 2'-O-methylguanosine-3'-phosphorothioate
  modified_base 20: mod_base = OTHER; note = 2'-O-methylguanosine-3'-phosphorothioate
  modified_base 21: mod_base = OTHER; note = 2'-O-methyladenosine
gagcaagtgacaaatgttgga

SEQ ID NO: 22 - RNA, 21 nt, synthetic construct
  source 1..21: mol_type = other RNA
  modified_base 1: mod_base = OTHER; note = 2'-O-methyladenosine-3'-phosphorothioate
  modified_base 2: mod_base = OTHER; note = 2'-O-methyladenosine-3'-phosphorothioate
  modified_base 3: mod_base = OTHER; note = 2'-O-methylguanosine-3'-phosphate
  modified_base 4: mod_base = OTHER; note = 2'-O-methylguanosine-3'-phosphate
  modified_base 5: mod_base = OTHER; note = 2'-O-methylguanosine-3'-phosphate
  modified_base 6: mod_base = OTHER; note = 2'-O-hexadecyl-uridine-3'-phosphate
  modified_base 7: mod_base = OTHER; note = 2'-O-methyladenosine-3'-phosphate
  modified_base 8: mod_base = OTHER; note = 2'-O-methyluridine-3'-phosphate
  modified_base 9: mod_base = OTHER; note = 2'-deoxy-2'-fluorocytidine-3'-phosphate
  modified_base 10: mod_base = OTHER; note = 2'-deoxy-2'-fluoroadenosine-3'-phosphate
  modified_base 11: mod_base = OTHER; note = 2'-deoxy-2'-fluoroadenosine-3'-phosphate
  modified_base 12: mod_base = OTHER; note = 2'-O-methylguanosine-3'-phosphate
  modified_base 13: mod_base = OTHER; note = 2'-O-methyladenosine-3'-phosphate
  modified_base 14: mod_base = OTHER; note = 2'-O-methylcytidine-3'-phosphate
  modified_base 15: mod_base = OTHER; note = 2'-O-methyluridine-3'-phosphate
  modified_base 16: mod_base = OTHER; note = 2'-O-methyladenosine-3'-phosphate
  modified_base 17: mod_base = OTHER; note = 2'-O-methylcytidine-3'-phosphate
  modified_base 18: mod_base = OTHER; note = 2'-O-methylguanosine-3'-phosphate
  modified_base 19: mod_base = OTHER; note = 2'-O-methyladenosine-3'-phosphorothioate
  modified_base 20: mod_base = OTHER; note = 2'-O-methyladenosine-3'-phosphorothioate
  modified_base 21: mod_base = OTHER; note = 2'-O-methyladenosine
aagggtatcaagactacgaaa

SEQ ID NO: 23 - RNA, 21 nt, synthetic construct
  source 1..21: mol_type = other RNA
  modified_base 1: mod_base = OTHER; note = 2'-O-methylcytidine-3'-phosphorothioate
  modified_base 2: mod_base = OTHER; note = 2'-O-methyluridine-3'-phosphorothioate
  modified_base 3: mod_base = OTHER; note = 2'-O-methylguanosine-3'-phosphate
  modified_base 4: mod_base = OTHER; note = 2'-O-methyladenosine-3'-phosphate
  modified_base 5: mod_base = OTHER; note = 2'-O-methyladenosine-3'-phosphate
  modified_base 6: mod_base = OTHER; note = 2'-O-hexadecyl-guanosine-3'-phosphate
  modified_base 7: mod_base = OTHER; note = 2'-O-methylcytidine-3'-phosphate
  modified_base 8: mod_base = OTHER; note = 2'-O-methylcytidine-3'-phosphate
  modified_base 9: mod_base = OTHER; note = 2'-deoxy-2'-fluorouridine-3'-phosphate
  modified_base 10: mod_base = OTHER; note = 2'-deoxy-2'-fluoroadenosine-3'-phosphate
  modified_base 11: mod_base = OTHER; note = 2'-deoxy-2'-fluoroadenosine-3'-phosphate
  modified_base 12: mod_base = OTHER; note = 2'-O-methylguanosine-3'-phosphate
  modified_base 13: mod_base = OTHER; note = 2'-O-methyladenosine-3'-phosphate
  modified_base 14: mod_base = OTHER; note = 2'-O-methyladenosine-3'-phosphate
  modified_base 15: mod_base = OTHER; note = 2'-O-methyladenosine-3'-phosphate
  modified_base 16: mod_base = OTHER; note = 2'-O-methyluridine-3'-phosphate
  modified_base 17: mod_base = OTHER; note = 2'-O-methyladenosine-3'-phosphate
  modified_base 18: mod_base = OTHER; note = 2'-O-methyluridine-3'-phosphate
  modified_base 19: mod_base = OTHER; note = 2'-O-methylcytidine-3'-phosphorothioate
  modified_base 20: mod_base = OTHER; note = 2'-O-methyluridine-3'-phosphorothioate
  modified_base 21: mod_base = OTHER; note = 2'-O-methyladenosine
ctgaagcctaagaaatatcta

SEQ ID NO: 24 - RNA, 21 nt, synthetic construct
  source 1..21: mol_type = other RNA
  modified_base 1: mod_base = OTHER; note = 2'-O-methyluridine-3'-phosphorothioate
  modified_base 2: mod_base = OTHER; note = 2'-O-methylguanosine-3'-phosphorothioate
  modified_base 3: mod_base = OTHER; note = 2'-O-methyladenosine-3'-phosphate
  modified_base 4: mod_base = OTHER; note = 2'-O-methyladenosine-3'-phosphate
  modified_base 5: mod_base = OTHER; note = 2'-O-methylguanosine-3'-phosphate
  modified_base 6: mod_base = OTHER; note = 2'-O-hexadecyl-cytidine-3'-phosphate
  modified_base 7: mod_base = OTHER; note = 2'-O-methylcytidine-3'-phosphate
  modified_base 8: mod_base = OTHER; note = 2'-O-methyluridine-3'-phosphate
  modified_base 9: mod_base = OTHER; note = 2'-deoxy-2'-fluoroadenosine-3'-phosphate
  modified_base 10: mod_base = OTHER; note = 2'-deoxy-2'-fluoroadenosine-3'-phosphate
  modified_base 11: mod_base = OTHER; note = 2'-deoxy-2'-fluoroguanosine-3'-phosphate
  modified_base 12: mod_base = OTHER; note = 2'-O-methyladenosine-3'-phosphate
  modified_base 13: mod_base = OTHER; note = 2'-O-methyladenosine-3'-phosphate
  modified_base 14: mod_base = OTHER; note = 2'-O-methyladenosine-3'-phosphate
  modified_base 15: mod_base = OTHER; note = 2'-O-methyluridine-3'-phosphate
  modified_base 16: mod_base = OTHER; note = 2'-O-methyladenosine-3'-phosphate
  modified_base 17: mod_base = OTHER; note = 2'-O-methyluridine-3'-phosphate
  modified_base 18: mod_base = OTHER; note = 2'-O-methylcytidine-3'-phosphate
  modified_base 19: mod_base = OTHER; note = 2'-O-methyluridine-3'-phosphorothioate
  modified_base 20: mod_base = OTHER; note = 2'-O-methyluridine-3'-phosphorothioate
  modified_base 21: mod_base = OTHER; note = 2'-O-methyladenosine
tgaagcctaagaaatatctta

SEQ ID NO: 25 - RNA, 21 nt, synthetic construct
  source 1..21: mol_type = other RNA
  modified_base 1: mod_base = OTHER; note = 2'-O-methyladenosine-3'-phosphorothioate
  modified_base 2: mod_base = OTHER; note = 2'-O-methyladenosine-3'-phosphorothioate
  modified_base 3: mod_base = OTHER; note = 2'-O-methylguanosine-3'-phosphate
  modified_base 4: mod_base = OTHER; note = 2'-O-methylcytidine-3'-phosphate
  modified_base 5: mod_base = OTHER; note = 2'-O-methylcytidine-3'-phosphate
  modified_base 6: mod_base = OTHER; note = 2'-O-hexadecyl-uridine-3'-phosphate
  modified_base 7: mod_base = OTHER; note = 2'-O-methyladenosine-3'-phosphate
  modified_base 8: mod_base = OTHER; note = 2'-O-methyladenosine-3'-phosphate
  modified_base 9: mod_base = OTHER; note = 2'-deoxy-2'-fluoroguanosine-3'-phosphate
  modified_base 10: mod_base = OTHER; note = 2'-deoxy-2'-fluoroadenosine-3'-phosphate
  modified_base 11: mod_base = OTHER; note = 2'-deoxy-2'-fluoroadenosine-3'-phosphate
  modified_base 12: mod_base = OTHER; note = 2'-O-methyladenosine-3'-phosphate
  modified_base 13: mod_base = OTHER; note = 2'-O-methyluridine-3'-phosphate
  modified_base 14: mod_base = OTHER; note = 2'-O-methyladenosine-3'-phosphate
  modified_base 15: mod_base = OTHER; note = 2'-O-methyluridine-3'-phosphate
  modified_base 16: mod_base = OTHER; note = 2'-O-methylcytidine-3'-phosphate
  modified_base 17: mod_base = OTHER; note = 2'-O-methyluridine-3'-phosphate
  modified_base 18: mod_base = OTHER; note = 2'-O-methyluridine-3'-phosphate
  modified_base 19: mod_base = OTHER; note = 2'-O-methyluridine-3'-phosphorothioate
  modified_base 20: mod_base = OTHER; note = 2'-O-methylguanosine-3'-phosphorothioate
  modified_base 21: mod_base = OTHER; note = 2'-O-methyladenosine
aagcctaagaaatatctttga

SEQ ID NO: 26 - RNA, 21 nt, synthetic construct
  source 1..21: mol_type = other RNA
  modified_base 1: mod_base = OTHER; note = 2'-O-methylcytidine-3'-phosphorothioate
  modified_base 2: mod_base = OTHER; note = 2'-O-methylcytidine-3'-phosphorothioate
  modified_base 3: mod_base = OTHER; note = 2'-O-methyluridine-3'-phosphate
  modified_base 4: mod_base = OTHER; note = 2'-O-methyladenosine-3'-phosphate
  modified_base 5: mod_base = OTHER; note = 2'-O-methyladenosine-3'-phosphate
  modified_base 6: mod_base = OTHER; note = 2'-O-hexadecyl-guanosine-3'-phosphate
  modified_base 7: mod_base = OTHER; note = 2'-O-methyladenosine-3'-phosphate
  modified_base 8: mod_base = OTHER; note = 2'-O-methyladenosine-3'-phosphate
  modified_base 9: mod_base = OTHER; note = 2'-deoxy-2'-fluoroadenosine-3'-phosphate
  modified_base 10: mod_base = OTHER; note = 2'-deoxy-2'-fluorouridine-3'-phosphate
  modified_base 11: mod_base = OTHER; note = 2'-deoxy-2'-fluoroadenosine-3'-phosphate
  modified_base 12: mod_base = OTHER; note = 2'-O-methyluridine-3'-phosphate
  modified_base 13: mod_base = OTHER; note = 2'-O-methylcytidine-3'-phosphate
  modified_base 14: mod_base = OTHER; note = 2'-O-methyluridine-3'-phosphate
  modified_base 15: mod_base = OTHER; note = 2'-O-methyluridine-3'-phosphate
  modified_base 16: mod_base = OTHER; note = 2'-O-methyluridine-3'-phosphate
  modified_base 17: mod_base = OTHER; note = 2'-O-methylguanosine-3'-phosphate
  modified_base 18: mod_base = OTHER; note = 2'-O-methylcytidine-3'-phosphate
  modified_base 19: mod_base = OTHER; note = 2'-O-methyluridine-3'-phosphorothioate
  modified_base 20: mod_base = OTHER; note = 2'-O-methylcytidine-3'-phosphorothioate
  modified_base 21: mod_base = OTHER; note = 2'-O-methyladenosine
cctaagaaatatctttgctca

SEQ ID NO: 27 - RNA, 21 nt, synthetic construct
  source 1..21: mol_type = other RNA
  modified_base 1: mod_base = OTHER; note = 2'-O-methyluridine-3'-phosphorothioate
  modified_base 2: mod_base = OTHER; note = 2'-O-methylcytidine-3'-phosphorothioate
  modified_base 3: mod_base = OTHER; note = 2'-O-methyluridine-3'-phosphate
  modified_base 4: mod_base = OTHER; note = 2'-O-methyluridine-3'-phosphate
  modified_base 5: mod_base = OTHER; note = 2'-O-methyluridine-3'-phosphate
  modified_base 6: mod_base = OTHER; note = 2'-O-hexadecyl-guanosine-3'-phosphate
  modified_base 7: mod_base = OTHER; note = 2'-O-methylcytidine-3'-phosphate
  modified_base 8: mod_base = OTHER; note = 2'-O-methyluridine-3'-phosphate
  modified_base 9: mod_base = OTHER; note = 2'-deoxy-2'-fluorocytidine-3'-phosphate
  modified_base 10: mod_base = OTHER; note = 2'-deoxy-2'-fluorocytidine-3'-phosphate
  modified_base 11: mod_base = OTHER; note = 2'-deoxy-2'-fluorocytidine-3'-phosphate
  modified_base 12: mod_base = OTHER; note = 2'-O-methyladenosine-3'-phosphate
  modified_base 13: mod_base = OTHER; note = 2'-O-methylguanosine-3'-phosphate
  modified_base 14: mod_base = OTHER; note = 2'-O-methyluridine-3'-phosphate
  modified_base 15: mod_base = OTHER; note = 2'-O-methyluridine-3'-phosphate
  modified_base 16: mod_base = OTHER; note = 2'-O-methyluridine-3'-phosphate
  modified_base 17: mod_base = OTHER; note = 2'-O-methylcytidine-3'-phosphate
  modified_base 18: mod_base = OTHER; note = 2'-O-methyluridine-3'-phosphate
  modified_base 19: mod_base = OTHER; note = 2'-O-methyluridine-3'-phosphorothioate
  modified_base 20: mod_base = OTHER; note = 2'-O-methylguanosine-3'-phosphorothioate
  modified_base 21: mod_base = OTHER; note = 2'-O-methyladenosine
tctttgctcccagtttcttga

SEQ ID NO: 28 - RNA, 21 nt, synthetic construct
  source 1..21: mol_type = other RNA
  modified_base 1: mod_base = OTHER; note = 2'-O-methyluridine-3'-phosphorothioate
  modified_base 2: mod_base = OTHER; note = 2'-O-methylcytidine-3'-phosphorothioate
  modified_base 3: mod_base = OTHER; note = 2'-O-methyluridine-3'-phosphate
  modified_base 4: mod_base = OTHER; note = 2'-O-methyluridine-3'-phosphate
  modified_base 5: mod_base = OTHER; note = 2'-O-methyluridine-3'-phosphate
  modified_base 6: mod_base = OTHER; note = 2'-O-methylguanosine-3'-phosphate
  modified_base 7: mod_base = OTHER; note = 2'-O-methylcytidine-3'-phosphate
  modified_base 8: mod_base = OTHER; note = 2'-O-methyluridine-3'-phosphate
  modified_base 9: mod_base = OTHER; note = 2'-deoxy-2'-fluorocytidine-3'-phosphate
  modified_base 10: mod_base = OTHER; note = 2'-deoxy-2'-fluorocytidine-3'-phosphate
  modified_base 11: mod_base = OTHER; note = 2'-deoxy-2'-fluorocytidine-3'-phosphate
  modified_base 12: mod_base = OTHER; note = 2'-O-methyladenosine-3'-phosphate
  modified_base 13: mod_base = OTHER; note = 2'-O-methylguanosine-3'-phosphate
  modified_base 14: mod_base = OTHER; note = 2'-O-methyluridine-3'-phosphate
  modified_base 15: mod_base = OTHER; note = 2'-O-methyluridine-3'-phosphate
  modified_base 16: mod_base = OTHER; note = 2'-O-hexadecyl-uridine-3'-phosphate
  modified_base 17: mod_base = OTHER; note = 2'-O-methylcytidine-3'-phosphate
  modified_base 18: mod_base = OTHER; note = 2'-O-methyluridine-3'-phosphate
  modified_base 19: mod_base = OTHER; note = 2'-O-methyluridine-3'-phosphorothioate
  modified_base 20: mod_base = OTHER; note = 2'-O-methylguanosine-3'-phosphorothioate
  modified_base 21: mod_base = OTHER; note = 2'-O-methyladenosine
tctttgctcccagtttcttga

SEQ ID NO: 29 - RNA, 21 nt, synthetic construct
  source 1..21: mol_type = other RNA
  modified_base 1: mod_base = OTHER; note = 2'-O-methylcytidine-3'-phosphorothioate
  modified_base 2: mod_base = OTHER; note = 2'-O-methyluridine-3'-phosphorothioate
  modified_base 3: mod_base = OTHER; note = 2'-O-methyluridine-3'-phosphate
  modified_base 4: mod_base = OTHER; note = 2'-O-methyluridine-3'-phosphate
  modified_base 5: mod_base = OTHER; note = 2'-O-methylguanosine-3'-phosphate
  modified_base 6: mod_base = OTHER; note = 2'-O-hexadecyl-cytidine-3'-phosphate
  modified_base 7: mod_base = OTHER; note = 2'-O-methyluridine-3'-phosphate
  modified_base 8: mod_base = OTHER; note = 2'-O-methylcytidine-3'-phosphate
  modified_base 9: mod_base = OTHER; note = 2'-deoxy-2'-fluorocytidine-3'-phosphate
  modified_base 10: mod_base = OTHER; note = 2'-deoxy-2'-fluorocytidine-3'-phosphate
  modified_base 11: mod_base = OTHER; note = 2'-deoxy-2'-fluoroadenosine-3'-phosphate
  modified_base 12: mod_base = OTHER; note = 2'-O-methylguanosine-3'-phosphate
  modified_base 13: mod_base = OTHER; note = 2'-O-methyluridine-3'-phosphate
  modified_base 14: mod_base = OTHER; note = 2'-O-methyluridine-3'-phosphate
  modified_base 15: mod_base = OTHER; note = 2'-O-methyluridine-3'-phosphate
  modified_base 16: mod_base = OTHER; note = 2'-O-methylcytidine-3'-phosphate
  modified_base 17: mod_base = OTHER; note = 2'-O-methyluridine-3'-phosphate
  modified_base 18: mod_base = OTHER; note = 2'-O-methyluridine-3'-phosphate
  modified_base 19: mod_base = OTHER; note = 2'-O-methylguanosine-3'-phosphorothioate
  modified_base 20: mod_base = OTHER; note = 2'-O-methyladenosine-3'-phosphorothioate
  modified_base 21: mod_base = OTHER; note = 2'-O-methyladenosine
ctttgctcccagtttcttgaa

SEQ ID NO: 30 - RNA, 21 nt, synthetic construct
  source 1..21: mol_type = other RNA
  modified_base 1: mod_base = OTHER; note = 2'-O-methyluridine-3'-phosphorothioate
  modified_base 2: mod_base = OTHER; note = 2'-O-methyluridine-3'-phosphorothioate
  modified_base 3: mod_base = OTHER; note = 2'-O-methyluridine-3'-phosphate
  modified_base 4: mod_base = OTHER; note = 2'-O-methylguanosine-3'-phosphate
  modified_base 5: mod_base = OTHER; note = 2'-O-methylcytidine-3'-phosphate
  modified_base 6: mod_base = OTHER; note = 2'-O-hexadecyl-uridine-3'-phosphate
  modified_base 7: mod_base = OTHER; note = 2'-O-methylcytidine-3'-phosphate
  modified_base 8: mod_base = OTHER; note = 2'-O-methylcytidine-3'-phosphate
  modified_base 9: mod_base = OTHER; note = 2'-deoxy-2'-fluorocytidine-3'-phosphate
  modified_base 10: mod_base = OTHER; note = 2'-deoxy-2'-fluoroadenosine-3'-phosphate
  modified_base 11: mod_base = OTHER; note = 2'-deoxy-2'-fluoroguanosine-3'-phosphate
  modified_base 12: mod_base = OTHER; note = 2'-O-methyluridine-3'-phosphate
  modified_base 13: mod_base = OTHER; note = 2'-O-methyluridine-3'-phosphate
  modified_base 14: mod_base = OTHER; note = 2'-O-methyluridine-3'-phosphate
  modified_base 15: mod_base = OTHER; note = 2'-O-methylcytidine-3'-phosphate
  modified_base 16: mod_base = OTHER; note = 2'-O-methyluridine-3'-phosphate
  modified_base 17: mod_base = OTHER; note = 2'-O-methyluridine-3'-phosphate
  modified_base 18: mod_base = OTHER; note = 2'-O-methylguanosine-3'-phosphate
  modified_base 19: mod_base = OTHER; note = 2'-O-methyladenosine-3'-phosphorothioate
  modified_base 20: mod_base = OTHER; note = 2'-O-methylguanosine-3'-phosphorothioate
  modified_base 21: mod_base = OTHER; note = 2'-O-methyladenosine
tttgctcccagtttcttgaga

SEQ ID NO: 31 - RNA, 21 nt, synthetic construct
  source 1..21: mol_type = other RNA
  modified_base 1: mod_base = OTHER; note = 2'-O-methyluridine-3'-phosphorothioate
  modified_base 2: mod_base = OTHER; note = 2'-O-methylcytidine-3'-phosphorothioate
  modified_base 3: mod_base = OTHER; note = 2'-O-methylcytidine-3'-phosphate
  modified_base 4: mod_base = OTHER; note = 2'-O-methylcytidine-3'-phosphate
  modified_base 5: mod_base = OTHER; note = 2'-O-methyladenosine-3'-phosphate
  modified_base 6: mod_base = OTHER; note = 2'-O-hexadecyl-guanosine-3'-phosphate
  modified_base 7: mod_base = OTHER; note = 2'-O-methyluridine-3'-phosphate
  modified_base 8: mod_base = OTHER; note = 2'-O-methyluridine-3'-phosphate
  modified_base 9: mod_base = OTHER; note = 2'-deoxy-2'-fluorouridine-3'-phosphate
  modified_base 10: mod_base = OTHER; note = 2'-deoxy-2'-fluorocytidine-3'-phosphate
  modified_base 11: mod_base = OTHER; note = 2'-deoxy-2'-fluorouridine-3'-phosphate
  modified_base 12: mod_base = OTHER; note = 2'-O-methyluridine-3'-phosphate
  modified_base 13: mod_base = OTHER; note = 2'-O-methylguanosine-3'-phosphate
  modified_base 14: mod_base = OTHER; note = 2'-O-methyladenosine-3'-phosphate
  modified_base 15: mod_base = OTHER; note = 2'-O-methylguanosine-3'-phosphate
  modified_base 16: mod_base = OTHER; note = 2'-O-methyladenosine-3'-phosphate
  modified_base 17: mod_base = OTHER; note = 2'-O-methyluridine-3'-phosphate
  modified_base 18: mod_base = OTHER; note = 2'-O-methylcytidine-3'-phosphate
  modified_base 19: mod_base = OTHER; note = 2'-O-methyluridine-3'-phosphorothioate
  modified_base 20: mod_base = OTHER; note = 2'-O-methylguanosine-3'-phosphorothioate
  modified_base 21: mod_base = OTHER; note = 2'-O-methyladenosine
tcccagtttcttgagatctga

SEQ ID NO: 32 - RNA, 21 nt, synthetic construct
  source 1..21: mol_type = other RNA
  modified_base 1: mod_base = OTHER; note = 2'-O-methylcytidine-3'-phosphorothioate
  modified_base 2: mod_base = OTHER; note = 2'-O-methyluridine-3'-phosphorothioate
  modified_base 3: mod_base = OTHER; note = 2'-O-methylguanosine-3'-phosphate
  modified_base 4: mod_base = OTHER; note = 2'-O-methyluridine-3'-phosphate
  modified_base 5: mod_base = OTHER; note = 2'-O-methyladenosine-3'-phosphate
  modified_base 6: mod_base = OTHER; note = 2'-O-hexadecyl-cytidine-3'-phosphate
  modified_base 7: mod_base = OTHER; note = 2'-deoxy-2'-fluoroadenosine-3'-phosphate
  modified_base 8: mod_base = OTHER; note = 2'-O-methyladenosine-3'-phosphate
  modified_base 9: mod_base = OTHER; note = 2'-deoxy-2'-fluoroguanosine-3'-phosphate
  modified_base 10: mod_base = OTHER; note = 2'-deoxy-2'-fluorouridine-3'-phosphate
  modified_base 11: mod_base = OTHER; note = 2'-deoxy-2'-fluoroguanosine-3'-phosphate
  modified_base 12: mod_base = OTHER; note = 2'-O-methylcytidine-3'-phosphate
  modified_base 13: mod_base = OTHER; note = 2'-O-methyluridine-3'-phosphate
  modified_base 14: mod_base = OTHER; note = 2'-O-methylcytidine-3'-phosphate
  modified_base 15: mod_base = OTHER; note = 2'-O-methyladenosine-3'-phosphate
  modified_base 16: mod_base = OTHER; note = 2'-O-methylguanosine-3'-phosphate
  modified_base 17: mod_base = OTHER; note = 2'-O-methyluridine-3'-phosphate
  modified_base 18: mod_base = OTHER; note = 2'-O-methyluridine-3'-phosphate
  modified_base 19: mod_base = OTHER; note = 2'-O-methylcytidine-3'-phosphorothioate
  modified_base 20: mod_base = OTHER; note = 2'-O-methylcytidine-3'-phosphorothioate
  modified_base 21: mod_base = OTHER; note = 2'-O-methyladenosine
ctgtacaagtgctcagttcca

SEQ ID NO: 33 - RNA, 21 nt, synthetic construct
  source 1..21: mol_type = other RNA
  modified_base 1: mod_base = OTHER; note = 2'-O-methyluridine-3'-phosphorothioate
  modified_base 2: mod_base = OTHER; note = 2'-O-methylguanosine-3'-phosphorothioate
  modified_base 3: mod_base = OTHER; note = 2'-O-methyluridine-3'-phosphate
  modified_base 4: mod_base = OTHER; note = 2'-O-methyladenosine-3'-phosphate
  modified_base 5: mod_base = OTHER; note = 2'-O-methylcytidine-3'-phosphate
  modified_base 6: mod_base = OTHER; note = 2'-O-hexadecyl-adenosine-3'-phosphate
  modified_base 7: mod_base = OTHER; note = 2'-deoxy-2'-fluoroadenosine-3'-phosphate
  modified_base 8: mod_base = OTHER; note = 2'-O-methylguanosine-3'-phosphate
  modified_base 9: mod_base = OTHER; note = 2'-deoxy-2'-fluorouridine-3'-phosphate
  modified_base 10: mod_base = OTHER; note = 2'-deoxy-2'-fluoroguanosine-3'-phosphate
  modified_base 11: mod_base = OTHER; note = 2'-deoxy-2'-fluorocytidine-3'-phosphate
  modified_base 12: mod_base = OTHER; note = 2'-O-methyluridine-3'-phosphate
  modified_base 13: mod_base = OTHER; note = 2'-O-methylcytidine-3'-phosphate
  modified_base 14: mod_base = OTHER; note = 2'-O-methyladenosine-3'-phosphate
  modified_base 15: mod_base = OTHER; note = 2'-O-methylguanosine-3'-phosphate
  modified_base 16: mod_base = OTHER; note = 2'-O-methyluridine-3'-phosphate
  modified_base 17: mod_base = OTHER; note = 2'-O-methyluridine-3'-phosphate
  modified_base 18: mod_base = OTHER; note = 2'-O-methylcytidine-3'-phosphate
  modified_base 19: mod_base = OTHER; note = 2'-O-methylcytidine-3'-phosphorothioate
  modified_base 20: mod_base = OTHER; note = 2'-O-methyladenosine-3'-phosphorothioate
  modified_base 21: mod_base = OTHER; note = 2'-O-methyladenosine
tgtacaagtgctcagttccaa

SEQ ID NO: 34 - RNA, 21 nt, synthetic construct
  source 1..21: mol_type = other RNA
  modified_base 1: mod_base = OTHER; note = 2'-O-methylguanosine-3'-phosphorothioate
  modified_base 2: mod_base = OTHER; note = 2'-O-methyluridine-3'-phosphorothioate
  modified_base 3: mod_base = OTHER; note = 2'-O-methyladenosine-3'-phosphate
  modified_base 4: mod_base = OTHER; note = 2'-O-methylcytidine-3'-phosphate
  modified_base 5: mod_base = OTHER; note = 2'-O-methyladenosine-3'-phosphate
  modified_base 6: mod_base = OTHER; note = 2'-O-hexadecyl-adenosine-3'-phosphate
  modified_base 7: mod_base = OTHER; note = 2'-deoxy-2'-fluoroguanosine-3'-phosphate
  modified_base 8: mod_base = OTHER; note = 2'-O-methyluridine-3'-phosphate
  modified_base 9: mod_base = OTHER; note = 2'-deoxy-2'-fluoroguanosine-3'-phosphate
  modified_base 10: mod_base = OTHER; note = 2'-deoxy-2'-fluorocytidine-3'-phosphate
  modified_base 11: mod_base = OTHER; note = 2'-deoxy-2'-fluorouridine-3'-phosphate
  modified_base 12: mod_base = OTHER; note = 2'-O-methylcytidine-3'-phosphate
  modified_base 13: mod_base = OTHER; note = 2'-O-methyladenosine-3'-phosphate
  modified_base 14: mod_base = OTHER; note = 2'-O-methylguanosine-3'-phosphate
  modified_base 15: mod_base = OTHER; note = 2'-O-methyluridine-3'-phosphate
  modified_base 16: mod_base = OTHER; note = 2'-O-methyluridine-3'-phosphate
  modified_base 17: mod_base = OTHER; note = 2'-O-methylcytidine-3'-phosphate
  modified_base 18: mod_base = OTHER; note = 2'-O-methylcytidine-3'-phosphate
  modified_base 19: mod_base = OTHER; note = 2'-O-methyladenosine-3'-phosphorothioate
  modified_base 20: mod_base = OTHER; note = 2'-O-methyladenosine-3'-phosphorothioate
  modified_base 21: mod_base = OTHER; note = 2'-O-methyladenosine
gtacaagtgctcagttccaaa

SEQ ID NO: 35 - RNA, 21 nt, synthetic construct
  source 1..21: mol_type = other RNA
  modified_base 1: mod_base = OTHER; note = 2'-O-methyladenosine-3'-phosphorothioate
  modified_base 2: mod_base = OTHER; note = 2'-O-methyladenosine-3'-phosphorothioate
  modified_base 3: mod_base = OTHER; note = 2'-O-methylguanosine-3'-phosphate
  modified_base 4: mod_base = OTHER; note = 2'-O-methyluridine-3'-phosphate
  modified_base 5: mod_base = OTHER; note = 2'-O-methylguanosine-3'-phosphate
  modified_base 6: mod_base = OTHER; note = 2'-O-hexadecyl-cytidine-3'-phosphate
  modified_base 7: mod_base = OTHER; note = 2'-O-methyluridine-3'-phosphate
  modified_base 8: mod_base = OTHER; note = 2'-O-methylcytidine-3'-phosphate
  modified_base 9: mod_base = OTHER; note = 2'-deoxy-2'-fluoroadenosine-3'-phosphate
  modified_base 10: mod_base = OTHER; note = 2'-deoxy-2'-fluoroguanosine-3'-phosphate
  modified_base 11: mod_base = OTHER; note = 2'-deoxy-2'-fluorouridine-3'-phosphate
  modified_base 12: mod_base = OTHER; note = 2'-O-methyluridine-3'-phosphate
  modified_base 13: mod_base = OTHER; note = 2'-O-methylcytidine-3'-phosphate
  modified_base 14: mod_base = OTHER; note = 2'-O-methylcytidine-3'-phosphate
  modified_base 15: mod_base = OTHER; note = 2'-O-methyladenosine-3'-phosphate
  modified_base 16: mod_base = OTHER; note = 2'-O-methyladenosine-3'-phosphate
  modified_base 17: mod_base = OTHER; note = 2'-O-methyluridine-3'-phosphate
  modified_base 18: mod_base = OTHER; note = 2'-O-methylguanosine-3'-phosphate
  modified_base 19: mod_base = OTHER; note = 2'-O-methyluridine-3'-phosphorothioate
  modified_base 20: mod_base = OTHER; note = 2'-O-methylguanosine-3'-phosphorothioate
  modified_base 21: mod_base = OTHER; note = 2'-O-methyladenosine
aagtgctcagttccaatgtga

SEQ ID NO: 36 - RNA, 21 nt, synthetic construct
  source 1..21: mol_type = other RNA
  modified_base 1: mod_base = OTHER; note = 2'-O-methyladenosine-3'-phosphorothioate
  modified_base 2: mod_base = OTHER; note = 2'-O-methylguanosine-3'-phosphorothioate
  modified_base 3: mod_base = OTHER; note = 2'-O-methyluridine-3'-phosphate
  modified_base 4: mod_base = OTHER; note = 2'-O-methylguanosine-3'-phosphate
  modified_base 5: mod_base = OTHER; note = 2'-O-methylcytidine-3'-phosphate
  modified_base 6: mod_base = OTHER; note = 2'-O-hexadecyl-uridine-3'-phosphate
  modified_base 7: mod_base = OTHER; note = 2'-O-methylcytidine-3'-phosphate
  modified_base 8: mod_base = OTHER; note = 2'-O-methyladenosine-3'-phosphate
  modified_base 9: mod_base = OTHER; note = 2'-deoxy-2'-fluoroguanosine-3'-phosphate
  modified_base 10: mod_base = OTHER; note = 2'-deoxy-2'-fluorouridine-3'-phosphate
  modified_base 11: mod_base = OTHER; note = 2'-deoxy-2'-fluorouridine-3'-phosphate
  modified_base 12: mod_base = OTHER; note = 2'-O-methylcytidine-3'-phosphate
  modified_base 13: mod_base = OTHER; note = 2'-O-methylcytidine-3'-phosphate
  modified_base 14: mod_base = OTHER; note = 2'-O-methyladenosine-3'-phosphate
  modified_base 15: mod_base = OTHER; note = 2'-O-methyladenosine-3'-phosphate
  modified_base 16: mod_base = OTHER; note = 2'-O-methyluridine-3'-phosphate
  modified_base 17: mod_base = OTHER; note = 2'-O-methylguanosine-3'-phosphate
  modified_base 18: mod_base = OTHER; note = 2'-O-methyluridine-3'-phosphate
  modified_base 19: mod_base = OTHER; note = 2'-O-methylguanosine-3'-phosphorothioate
  modified_base 20: mod_base = OTHER; note = 2'-O-methylcytidine-3'-phosphorothioate
  modified_base 21: mod_base = OTHER; note = 2'-O-methyladenosine
agtgctcagttccaatgtgca

SEQ ID NO: 37 - RNA, 21 nt, synthetic construct
  source 1..21: mol_type = other RNA
  modified_base 1: mod_base = OTHER; note = 2'-O-methyluridine-3'-phosphorothioate
  modified_base 2: mod_base = OTHER; note = 2'-O-methylguanosine-3'-phosphorothioate
  modified_base 3: mod_base = OTHER; note = 2'-O-methylcytidine-3'-phosphate
  modified_base 4: mod_base = OTHER; note = 2'-O-methylcytidine-3'-phosphate
  modified_base 5: mod_base = OTHER; note = 2'-O-methylcytidine-3'-phosphate
  modified_base 6: mod_base = OTHER; note = 2'-O-hexadecyl-adenosine-3'-phosphate
  modified_base 7: mod_base = OTHER; note = 2'-O-methylguanosine-3'-phosphate
  modified_base 8: mod_base = OTHER; note = 2'-O-methyluridine-3'-phosphate
  modified_base 9: mod_base = OTHER; note = 2'-deoxy-2'-fluorocytidine-3'-phosphate
  modified_base 10: mod_base = OTHER; note = 2'-deoxy-2'-fluoroadenosine-3'-phosphate
  modified_base 11: mod_base = OTHER; note = 2'-deoxy-2'-fluorouridine-3'-phosphate
  modified_base 12: mod_base = OTHER; note = 2'-O-methylguanosine-3'-phosphate
  modified_base 13: mod_base = OTHER; note = 2'-O-methyladenosine-3'-phosphate
  modified_base 14: mod_base = OTHER; note = 2'-O-methylcytidine-3'-phosphate
  modified_base 15: mod_base = OTHER; note = 2'-O-methyladenosine-3'-phosphate
  modified_base 16: mod_base = OTHER; note = 2'-O-methyluridine-3'-phosphate
  modified_base 17: mod_base = OTHER; note = 2'-O-methyluridine-3'-phosphate
  modified_base 18: mod_base = OTHER; note = 2'-O-methyluridine-3'-phosphate
  modified_base 19: mod_base = OTHER; note = 2'-O-methylcytidine-3'-phosphorothioate
  modified_base 20: mod_base = OTHER; note = 2'-O-methyluridine-3'-phosphorothioate
  modified_base 21: mod_base = OTHER; note = 2'-O-methyladenosine
tgcccagtcatgacatttcta

SEQ ID NO: 38 - RNA, 21 nt, synthetic construct
  source 1..21: mol_type = other RNA
  modified_base 1: mod_base = OTHER; note = 2'-O-methylcytidine-3'-phosphorothioate
  modified_base 2: mod_base = OTHER; note = 2'-O-methylcytidine-3'-phosphorothioate
  modified_base 3: mod_base = OTHER; note = 2'-O-methyladenosine-3'-phosphate
  modified_base 4: mod_base = OTHER; note = 2'-O-methylguanosine-3'-phosphate
  modified_base 5: mod_base = OTHER; note = 2'-O-methyluridine-3'-phosphate
  modified_base 6: mod_base = OTHER; note = 2'-O-hexadecyl-cytidine-3'-phosphate
  modified_base 7: mod_base = OTHER; note = 2'-O-methyladenosine-3'-phosphate
  modified_base 8: mod_base = OTHER; note = 2'-O-methyluridine-3'-phosphate
  modified_base 9: mod_base = OTHER; note = 2'-deoxy-2'-fluoroguanosine-3'-phosphate
  modified_base 10: mod_base = OTHER; note = 2'-deoxy-2'-fluoroadenosine-3'-phosphate
  modified_base 11: mod_base = OTHER; note = 2'-deoxy-2'-fluorocytidine-3'-phosphate
  modified_base 12: mod_base = OTHER; note = 2'-O-methyladenosine-3'-phosphate
  modified_base 13: mod_base = OTHER; note = 2'-O-methyluridine-3'-phosphate
  modified_base 14: mod_base = OTHER; note = 2'-O-methyluridine-3'-phosphate
  modified_base 15: mod_base = OTHER; note = 2'-O-methyluridine-3'-phosphate
  modified_base 16: mod_base = OTHER; note = 2'-O-methylcytidine-3'-phosphate
  modified_base 17: mod_base = OTHER; note = 2'-O-methyluridine-3'-phosphate
  modified_base 18: mod_base = OTHER; note = 2'-O-methylcytidine-3'-phosphate
  modified_base 19: mod_base = OTHER; note = 2'-O-methyladenosine-3'-phosphorothioate
  modified_base 20: mod_base = OTHER; note = 2'-O-methyladenosine-3'-phosphorothioate
  modified_base 21: mod_base = OTHER; note = 2'-O-methyladenosine
ccagtcatgacatttctcaaa

SEQ ID NO: 39 - RNA, 21 nt, synthetic construct
  source 1..21: mol_type = other RNA
  modified_base 1: mod_base = OTHER; note = 2'-O-methylguanosine-3'-phosphorothioate
  modified_base 2: mod_base = OTHER; note = 2'-O-methyluridine-3'-phosphorothioate
  modified_base 3: mod_base = OTHER; note = 2'-O-methylcytidine-3'-phosphate
  modified_base 4: mod_base = OTHER; note = 2'-O-methyladenosine-3'-phosphate
  modified_base 5: mod_base = OTHER; note = 2'-O-methyluridine-3'-phosphate
  modified_base 6: mod_base = OTHER; note = 2'-O-hexadecyl-guanosine-3'-phosphate
  modified_base 7: mod_base = OTHER; note = 2'-O-methyladenosine-3'-phosphate
  modified_base 8: mod_base = OTHER; note = 2'-O-methylcytidine-3'-phosphate
  modified_base 9: mod_base = OTHER; note = 2'-deoxy-2'-fluoroadenosine-3'-phosphate
  modified_base 10: mod_base = OTHER; note = 2'-deoxy-2'-fluorouridine-3'-phosphate
  modified_base 11: mod_base = OTHER; note = 2'-deoxy-2'-fluorouridine-3'-phosphate
  modified_base 12: mod_base = OTHER; note = 2'-O-methyluridine-3'-phosphate
  modified_base 13: mod_base = OTHER; note = 2'-O-methylcytidine-3'-phosphate
  modified_base 14: mod_base = OTHER; note = 2'-O-methyluridine-3'-phosphate
  modified_base 15: mod_base = OTHER; note = 2'-O-methylcytidine-3'-phosphate
  modified_base 16: mod_base = OTHER; note = 2'-O-methyladenosine-3'-phosphate
  modified_base 17: mod_base = OTHER; note = 2'-O-methyladenosine-3'-phosphate
  modified_base 18: mod_base = OTHER; note = 2'-O-methyladenosine-3'-phosphate
  modified_base 19: mod_base = OTHER; note = 2'-O-methylguanosine-3'-phosphorothioate
  modified_base 20: mod_base = OTHER; note = 2'-O-methyluridine-3'-phosphorothioate
  modified_base 21: mod_base = OTHER; note = 2'-O-methyladenosine
gtcatgacatttctcaaagta

SEQ ID NO: 40 - RNA, 21 nt, synthetic construct
  source 1..21: mol_type = other RNA
  modified_base 1: mod_base = OTHER; note = 2'-O-methylcytidine-3'-phosphorothioate
  modified_base 2: mod_base = OTHER; note = 2'-O-methyladenosine-3'-phosphorothioate
  modified_base 3: mod_base = OTHER; note = 2'-O-methyluridine-3'-phosphate
  modified_base 4: mod_base = OTHER; note = 2'-O-methylguanosine-3'-phosphate
  modified_base 5: mod_base = OTHER; note = 2'-O-methyladenosine-3'-phosphate
  modified_base 6: mod_base = OTHER; note = 2'-O-hexadecyl-cytidine-3'-phosphate
  modified_base 7: mod_base = OTHER; note = 2'-O-methyladenosine-3'-phosphate
  modified_base 8: mod_base = OTHER; note = 2'-O-methyluridine-3'-phosphate
  modified_base 9: mod_base = OTHER; note = 2'-deoxy-2'-fluorouridine-3'-phosphate
  modified_base 10: mod_base = OTHER; note = 2'-deoxy-2'-fluorouridine-3'-phosphate
  modified_base 11: mod_base = OTHER; note = 2'-deoxy-2'-fluorocytidine-3'-phosphate
  modified_base 12: mod_base = OTHER; note = 2'-O-methyluridine-3'-phosphate
  modified_base 13: mod_base = OTHER; note = 2'-O-methylcytidine-3'-phosphate
  modified_base 14: mod_base = OTHER; note = 2'-O-methyladenosine-3'-phosphate
  modified_base 15: mod_base = OTHER; note = 2'-O-methyladenosine-3'-phosphate
  modified_base 16: mod_base = OTHER; note = 2'-O-methyladenosine-3'-phosphate
  modified_base 17: mod_base = OTHER; note = 2'-O-methylguanosine-3'-phosphate
  modified_base 18: mod_base = OTHER; note = 2'-O-methyluridine-3'-phosphate
  modified_base 19: mod_base = OTHER; note = 2'-O-methyluridine-3'-phosphorothioate
  modified_base 20: mod_base = OTHER; note = 2'-O-methyluridine-3'-phosphorothioate
  modified_base 21: mod_base = OTHER; note = 2'-O-methyladenosine
catgacatttctcaaagttta

SEQ ID NO: 41 - RNA, 21 nt, synthetic construct
  source 1..21: mol_type = other RNA
  modified_base 1: mod_base = OTHER; note = 2'-O-methyluridine-3'-phosphorothioate
  modified_base 2: mod_base = OTHER; note = 2'-O-methylcytidine-3'-phosphorothioate
  modified_base 3: mod_base = OTHER; note = 2'-O-methyluridine-3'-phosphate
  modified_base 4: mod_base = OTHER; note = 2'-O-methyluridine-3'-phosphate
  modified_base 5: mod_base = OTHER; note = 2'-O-methylcytidine-3'-phosphate
  modified_base 6: mod_base = OTHER; note = 2'-O-hexadecyl-cytidine-3'-phosphate
  modified_base 7: mod_base = OTHER; note = 2'-O-methyladenosine-3'-phosphate
  modified_base 8: mod_base = OTHER; note = 2'-O-methyluridine-3'-phosphate
  modified_base 9: mod_base = OTHER; note = 2'-deoxy-2'-fluorocytidine-3'-phosphate
  modified_base 10: mod_base = OTHER; note = 2'-deoxy-2'-fluoroadenosine-3'-phosphate
  modified_base 11: mod_base = OTHER; note = 2'-deoxy-2'-fluoroguanosine-3'-phosphate
  modified_base 12: mod_base = OTHER; note = 2'-O-methylcytidine-3'-phosphate
  modified_base 13: mod_base = OTHER; note = 2'-O-methyladenosine-3'-phosphate
  modified_base 14: mod_base = OTHER; note = 2'-O-methylguanosine-3'-phosphate
  modified_base 15: mod_base = OTHER; note = 2'-O-methyluridine-3'-phosphate
  modified_base 16: mod_base = OTHER; note = 2'-O-methylguanosine-3'-phosphate
  modified_base 17: mod_base = OTHER; note = 2'-O-methyladenosine-3'-phosphate
  modified_base 18: mod_base = OTHER; note = 2'-O-methyluridine-3'-phosphate
  modified_base 19: mod_base = OTHER; note = 2'-O-methyluridine-3'-phosphorothioate
  modified_base 20: mod_base = OTHER; note = 2'-O-methylguanosine-3'-phosphorothioate
  modified_base 21: mod_base = OTHER; note = 2'-O-methyladenosine
tcttccatcagcagtgattga

SEQ ID NO: 42 - RNA, 21 nt, synthetic construct
  source 1..21: mol_type = other RNA
  modified_base 1: mod_base = OTHER; note = 2'-O-methyluridine-3'-phosphorothioate
  modified_base 2: mod_base = OTHER; note = 2'-O-methyluridine-3'-phosphorothioate
  modified_base 3: mod_base = OTHER; note = 2'-O-methylcytidine-3'-phosphate
  modified_base 4: mod_base = OTHER; note = 2'-O-methylcytidine-3'-phosphate
  modified_base 5: mod_base = OTHER; note = 2'-O-methyladenosine-3'-phosphate
  modified_base 6: mod_base = OTHER; note = 2'-O-hexadecyl-uridine-3'-phosphate
  modified_base 7: mod_base = OTHER; note = 2'-deoxy-2'-fluorocytidine-3'-phosphate
  modified_base 8: mod_base = OTHER; note = 2'-O-methyladenosine-3'-phosphate
  modified_base 9: mod_base = OTHER; note = 2'-deoxy-2'-fluoroguanosine-3'-phosphate
  modified_base 10: mod_base = OTHER; note = 2'-deoxy-2'-fluorocytidine-3'-phosphate
  modified_base 11: mod_base = OTHER; note = 2'-deoxy-2'-fluoroadenosine-3'-phosphate
  modified_base 12: mod_base = OTHER; note = 2'-O-methylguanosine-3'-phosphate
  modified_base 13: mod_base = OTHER; note = 2'-O-methyluridine-3'-phosphate
  modified_base 14: mod_base = OTHER; note = 2'-O-methylguanosine-3'-phosphate
  modified_base 15: mod_base = OTHER; note = 2'-O-methyladenosine-3'-phosphate
  modified_base 16: mod_base = OTHER; note = 2'-O-methyluridine-3'-phosphate
  modified_base 17: mod_base = OTHER; note = 2'-O-methyluridine-3'-phosphate
  modified_base 18: mod_base = OTHER; note = 2'-O-methylguanosine-3'-phosphate
  modified_base 19: mod_base = OTHER; note = 2'-O-methyladenosine-3'-phosphorothioate
  modified_base 20: mod_base = OTHER; note = 2'-O-methyladenosine-3'-phosphorothioate
  modified_base 21: mod_base = OTHER; note = 2'-O-methyladenosine
ttccatcagcagtgattgaaa

SEQ ID NO: 43 - RNA, 21 nt, synthetic construct
  source 1..21: mol_type = other RNA
  modified_base 1: mod_base = OTHER; note = 2'-O-methylcytidine-3'-phosphorothioate
  modified_base 2: mod_base = OTHER; note = 2'-O-methylcytidine-3'-phosphorothioate
  modified_base 3: mod_base = OTHER; note = 2'-O-methyladenosine-3'-phosphate
  modified_base 4: mod_base = OTHER; note = 2'-O-methyluridine-3'-phosphate
  modified_base 5: mod_base = OTHER; note = 2'-O-methylcytidine-3'-phosphate
  modified_base 6: mod_base = OTHER; note = 2'-O-hexadecyl-adenosine-3'-phosphate
  modified_base 7: mod_base = OTHER; note = 2'-O-methylguanosine-3'-phosphate
  modified_base 8: mod_base = OTHER; note = 2'-O-methylcytidine-3'-phosphate
  modified_base 9: mod_base = OTHER; note = 2'-deoxy-2'-fluoroadenosine-3'-phosphate
  modified_base 10: mod_base = OTHER; note = 2'-deoxy-2'-fluoroguanosine-3'-phosphate
  modified_base 11: mod_base = OTHER; note = 2'-deoxy-2'-fluorouridine-3'-phosphate
  modified_base 12: mod_base = OTHER; note = 2'-O-methylguanosine-3'-phosphate
  modified_base 13: mod_base = OTHER; note = 2'-O-methyladenosine-3'-phosphate
  modified_base 14: mod_base = OTHER; note = 2'-O-methyluridine-3'-phosphate
  modified_base 15: mod_base = OTHER; note = 2'-O-methyluridine-3'-phosphate
  modified_base 16: mod_base = OTHER; note = 2'-O-methylguanosine-3'-phosphate
  modified_base 17: mod_base = OTHER; note = 2'-O-methyladenosine-3'-phosphate
  modified_base 18: mod_base = OTHER; note = 2'-O-methyladenosine-3'-phosphate
  modified_base 19: mod_base = OTHER; note = 2'-O-methylguanosine-3'-phosphorothioate
  modified_base 20: mod_base = OTHER; note = 2'-O-methyluridine-3'-phosphorothioate
  modified_base 21: mod_base = OTHER; note = 2'-O-methyladenosine
ccatcagcagtgattgaagta

SEQ ID NO: 44 - RNA, 21 nt, synthetic construct
  source 1..21: mol_type = other RNA
  modified_base 1: mod_base = OTHER; note = 2'-O-methylcytidine-3'-phosphorothioate
  modified_base 2: mod_base = OTHER; note = 2'-O-methylcytidine-3'-phosphorothioate
  modified_base 3: mod_base = OTHER; note = 2'-O-methyladenosine-3'-phosphate
  modified_base 4: mod_base = OTHER; note = 2'-O-methyluridine-3'-phosphate
  modified_base 5: mod_base = OTHER; note = 2'-O-methylcytidine-3'-phosphate
  modified_base 6: mod_base = OTHER; note = 2'-O-hexadecyl-adenosine-3'-phosphate
  modified_base 7: mod_base = OTHER; note = 2'-deoxy-2'-fluoroguanosine-3'-phosphate
  modified_base 8: mod_base = OTHER; note = 2'-O-methylcytidine-3'-phosphate
  modified_base 9: mod_base = OTHER; note = 2'-deoxy-2'-fluoroadenosine-3'-phosphate
  modified_base 10: mod_base = OTHER; note = 2'-deoxy-2'-fluoroguanosine-3'-phosphate
  modified_base 11: mod_base = OTHER; note = 2'-deoxy-2'-fluorouridine-3'-phosphate
  modified_base 12: mod_base = OTHER; note = 2'-O-methylguanosine-3'-phosphate
  modified_base 13: mod_base = OTHER; note = 2'-O-methyladenosine-3'-phosphate
  modified_base 14: mod_base = OTHER; note = 2'-O-methyluridine-3'-phosphate
  modified_base 15: mod_base = OTHER; note = 2'-O-methyluridine-3'-phosphate
  modified_base 16: mod_base = OTHER; note = 2'-O-methylguanosine-3'-phosphate
  modified_base 17: mod_base = OTHER; note = 2'-O-methyladenosine-3'-phosphate
  modified_base 18: mod_base = OTHER; note = 2'-O-methyladenosine-3'-phosphate
  modified_base 19: mod_base = OTHER; note = 2'-O-methylguanosine-3'-phosphorothioate
  modified_base 20: mod_base = OTHER; note = 2'-O-methyluridine-3'-phosphorothioate
  modified_base 21: mod_base = OTHER; note = 2'-O-methyladenosine
ccatcagcagtgattgaagta

SEQ ID NO: 45 - RNA, 21 nt, synthetic construct
  source 1..21: mol_type = other RNA
  modified_base 1: mod_base = OTHER; note = 2'-O-methyladenosine-3'-phosphorothioate
  modified_base 2: mod_base = OTHER; note = 2'-O-methyluridine-3'-phosphorothioate
  modified_base 3: mod_base = OTHER; note = 2'-O-methylcytidine-3'-phosphate
  modified_base 4: mod_base = OTHER; note = 2'-O-methyladenosine-3'-phosphate
  modified_base 5: mod_base = OTHER; note = 2'-O-methylguanosine-3'-phosphate
  modified_base 6: mod_base = OTHER; note = 2'-O-hexadecyl-cytidine-3'-phosphate
  modified_base 7: mod_base = OTHER; note = 2'-O-methyladenosine-3'-phosphate
  modified_base 8: mod_base = OTHER; note = 2'-O-methylguanosine-3'-phosphate
  modified_base 9: mod_base = OTHER; note = 2'-deoxy-2'-fluorouridine-3'-phosphate
  modified_base 10: mod_base = OTHER; note = 2'-deoxy-2'-fluoroguanosine-3'-phosphate
  modified_base 11: mod_base = OTHER; note = 2'-deoxy-2'-fluoroadenosine-3'-phosphate
  modified_base 12: mod_base = OTHER; note = 2'-O-methyluridine-3'-phosphate
  modified_base 13: mod_base = OTHER; note = 2'-O-methyluridine-3'-phosphate
  modified_base 14: mod_base = OTHER; note = 2'-O-methylguanosine-3'-phosphate
  modified_base 15: mod_base = OTHER; note = 2'-O-methyladenosine-3'-phosphate
  modified_base 16: mod_base = OTHER; note = 2'-O-methyladenosine-3'-phosphate
  modified_base 17: mod_base = OTHER; note = 2'-O-methylguanosine-3'-phosphate
  modified_base 18: mod_base = OTHER; note = 2'-O-methyluridine-3'-phosphate
  modified_base 19: mod_base = OTHER; note = 2'-O-methyladenosine-3'-phosphorothioate
  modified_base 20: mod_base = OTHER; note = 2'-O-methyluridine-3'-phosphorothioate
  modified_base 21: mod_base = OTHER; note = 2'-O-methyladenosine
atcagcagtgattgaagtata

SEQ ID NO: 46 - RNA, 21 nt, synthetic construct
  source 1..21: mol_type = other RNA
  modified_base 1: mod_base = OTHER; note = 2'-O-methyladenosine-3'-phosphorothioate
  modified_base 2: mod_base = OTHER; note = 2'-O-methyluridine-3'-phosphorothioate
  modified_base 3: mod_base = OTHER; note = 2'-O-methylcytidine-3'-phosphate
  modified_base 4: mod_base = OTHER; note = 2'-O-methyladenosine-3'-phosphate
  modified_base 5: mod_base = OTHER; note = 2'-O-methylguanosine-3'-phosphate
  modified_base 6: mod_base = OTHER; note = 2'-O-hexadecyl-cytidine-3'-phosphate
  modified_base 7: mod_base = OTHER; note = 2'-deoxy-2'-fluoroadenosine-3'-phosphate
  modified_base 8: mod_base = OTHER; note = 2'-O-methylguanosine-3'-phosphate
  modified_base 9: mod_base = OTHER; note = 2'-deoxy-2'-fluorouridine-3'-phosphate
  modified_base 10: mod_base = OTHER; note = 2'-deoxy-2'-fluoroguanosine-3'-phosphate
  modified_base 11: mod_base = OTHER; note = 2'-deoxy-2'-fluoroadenosine-3'-phosphate
  modified_base 12: mod_base = OTHER; note = 2'-O-methyluridine-3'-phosphate
  modified_base 13: mod_base = OTHER; note = 2'-O-methyluridine-3'-phosphate
  modified_base 14: mod_base = OTHER; note = 2'-O-methylguanosine-3'-phosphate
  modified_base 15: mod_base = OTHER; note = 2'-O-methyladenosine-3'-phosphate
  modified_base 16: mod_base = OTHER; note = 2'-O-methyladenosine-3'-phosphate
  modified_base 17: mod_base = OTHER; note = 2'-O-methylguanosine-3'-phosphate
  modified_base 18: mod_base = OTHER; note = 2'-O-methyluridine-3'-phosphate
  modified_base 19: mod_base = OTHER; note = 2'-O-methyladenosine-3'-phosphorothioate
  modified_base 20: mod_base = OTHER; note = 2'-O-methyluridine-3'-phosphorothioate
  modified_base 21: mod_base = OTHER; note = 2'-O-methyladenosine
atcagcagtgattgaagtata

SEQ ID NO: 47 - RNA, 21 nt, synthetic construct
  source 1..21: mol_type = other RNA
  modified_base 1: mod_base = OTHER; note = 2'-O-methyladenosine-3'-phosphorothioate
  modified_base 2: mod_base = OTHER; note = 2'-O-methylguanosine-3'-phosphorothioate
  modified_base 3: mod_base = OTHER; note = 2'-O-methylcytidine-3'-phosphate
  modified_base 4: mod_base = OTHER; note = 2'-O-methyladenosine-3'-phosphate
  modified_base 5: mod_base = OTHER; note = 2'-O-methylguanosine-3'-phosphate
  modified_base 6: mod_base = OTHER; note = 2'-O-hexadecyl-uridine-3'-phosphate
  modified_base 7: mod_base = OTHER; note = 2'-O-methylguanosine-3'-phosphate
  modified_base 8: mod_base = OTHER; note = 2'-O-methyladenosine-3'-phosphate
  modified_base 9: mod_base = OTHER; note = 2'-deoxy-2'-fluorouridine-3'-phosphate
  modified_base 10: mod_base = OTHER; note = 2'-deoxy-2'-fluorouridine-3'-phosphate
  modified_base 11: mod_base = OTHER; note = 2'-deoxy-2'-fluoroguanosine-3'-phosphate
  modified_base 12: mod_base = OTHER; note = 2'-O-methyladenosine-3'-phosphate
  modified_base 13: mod_base = OTHER; note = 2'-O-methyladenosine-3'-phosphate
  modified_base 14: mod_base = OTHER; note = 2'-O-methylguanosine-3'-phosphate
  modified_base 15: mod_base = OTHER; note = 2'-O-methyluridine-3'-phosphate
  modified_base 16: mod_base = OTHER; note = 2'-O-methyladenosine-3'-phosphate
  modified_base 17: mod_base = OTHER; note = 2'-O-methyluridine-3'-phosphate
  modified_base 18: mod_base = OTHER; note = 2'-O-methylcytidine-3'-phosphate
  modified_base 19: mod_base = OTHER; note = 2'-O-methyluridine-3'-phosphorothioate
  modified_base 20: mod_base = OTHER; note = 2'-O-methylguanosine-3'-phosphorothioate
  modified_base 21: mod_base = OTHER; note = 2'-O-methyladenosine
agcagtgattgaagtatctga

SEQ ID NO: 48 - RNA, 21 nt, synthetic construct
  source 1..21: mol_type = other RNA
  modified_base 1: mod_base = OTHER; note = 2'-O-methylguanosine-3'-phosphorothioate
  modified_base 2: mod_base = OTHER; note = 2'-O-methylcytidine-3'-phosphorothioate
  modified_base 3: mod_base = OTHER; note = 2'-O-methyladenosine-3'-phosphate
  modified_base 4: mod_base = OTHER; note = 2'-O-methylguanosine-3'-phosphate
  modified_base 5: mod_base = OTHER; note = 2'-O-methyluridine-3'-phosphate
  modified_base 6: mod_base = OTHER; note = 2'-O-hexadecyl-guanosine-3'-phosphate
  modified_base 7: mod_base = OTHER; note = 2'-O-methyladenosine-3'-phosphate
  modified_base 8: mod_base = OTHER; note = 2'-O-methyluridine-3'-phosphate
  modified_base 9: mod_base = OTHER; note = 2'-deoxy-2'-fluorouridine-3'-phosphate
  modified_base 10: mod_base = OTHER; note = 2'-deoxy-2'-fluoroguanosine-3'-phosphate
  modified_base 11: mod_base = OTHER; note = 2'-deoxy-2'-fluoroadenosine-3'-phosphate
  modified_base 12: mod_base = OTHER; note = 2'-O-methyladenosine-3'-phosphate
  modified_base 13: mod_base = OTHER; note = 2'-O-methylguanosine-3'-phosphate
  modified_base 14: mod_base = OTHER; note = 2'-O-methyluridine-3'-phosphate
  modified_base 15: mod_base = OTHER; note = 2'-O-methyladenosine-3'-phosphate
  modified_base 16: mod_base = OTHER; note = 2'-O-methyluridine-3'-phosphate
  modified_base 17: mod_base = OTHER; note = 2'-O-methylcytidine-3'-phosphate
  modified_base 18: mod_base = OTHER; note = 2'-O-methyluridine-3'-phosphate
  modified_base 19: mod_base = OTHER; note = 2'-O-methylguanosine-3'-phosphorothioate
  modified_base 20: mod_base = OTHER; note = 2'-O-methyluridine-3'-phosphorothioate
  modified_base 21: mod_base = OTHER; note = 2'-O-methyladenosine
gcagtgattgaagtatctgta

SEQ ID NO: 49 - RNA, 21 nt, synthetic construct
  source 1..21: mol_type = other RNA
  modified_base 1: mod_base = OTHER; note = 2'-O-methylguanosine-3'-phosphorothioate
  modified_base 2: mod_base = OTHER; note = 2'-O-methylcytidine-3'-phosphorothioate
  modified_base 3: mod_base = OTHER; note = 2'-O-methyladenosine-3'-phosphate
  modified_base 4: mod_base = OTHER; note = 2'-O-methylguanosine-3'-phosphate
  modified_base 5: mod_base = OTHER; note = 2'-O-methyluridine-3'-phosphate
  modified_base 6: mod_base = OTHER; note = 2'-O-hexadecyl-guanosine-3'-phosphate
  modified_base 7: mod_base = OTHER; note = 2'-deoxy-2'-fluoroadenosine-3'-phosphate
  modified_base 8: mod_base = OTHER; note = 2'-O-methyluridine-3'-phosphate
  modified_base 9: mod_base = OTHER; note = 2'-deoxy-2'-fluorouridine-3'-phosphate
  modified_base 10: mod_base = OTHER; note = 2'-deoxy-2'-fluoroguanosine-3'-phosphate
  modified_base 11: mod_base = OTHER; note = 2'-deoxy-2'-fluoroadenosine-3'-phosphate
  modified_base 12: mod_base = OTHER; note = 2'-O-methyladenosine-3'-phosphate
  modified_base 13: mod_base = OTHER; note = 2'-O-methylguanosine-3'-phosphate
  modified_base 14: mod_base = OTHER; note = 2'-O-methyluridine-3'-phosphate
  modified_base 15: mod_base = OTHER; note = 2'-O-methyladenosine-3'-phosphate
  modified_base 16: mod_base = OTHER; note = 2'-O-methyluridine-3'-phosphate
  modified_base 17: mod_base = OTHER; note = 2'-O-methylcytidine-3'-phosphate
  modified_base 18: mod_base = OTHER; note = 2'-O-methyluridine-3'-phosphate
  modified_base 19: mod_base = OTHER; note = 2'-O-methylguanosine-3'-phosphorothioate
  modified_base 20: mod_base = OTHER; note = 2'-O-methyluridine-3'-phosphorothioate
  modified_base 21: mod_base = OTHER; note = 2'-O-methyladenosine
gcagtgattgaagtatctgta

SEQ ID NO: 50 - RNA, 21 nt, synthetic construct
  source 1..21: mol_type = other RNA
  modified_base 1: mod_base = OTHER; note = 2'-O-methyluridine-3'-phosphorothioate
  modified_base 2: mod_base = OTHER; note = 2'-O-methyluridine-3'-phosphorothioate
  modified_base 3: mod_base = OTHER; note = 2'-O-methylcytidine-3'-phosphate
  modified_base 4: mod_base = OTHER; note = 2'-O-methyladenosine-3'-phosphate
  modified_base 5: mod_base = OTHER; note = 2'-O-methylcytidine-3'-phosphate
  modified_base 6: mod_base = OTHER; note = 2'-O-hexadecyl-uridine-3'-phosphate
  modified_base 7: mod_base = OTHER; note = 2'-O-methylguanosine-3'-phosphate
  modified_base 8: mod_base = OTHER; note = 2'-O-methyladenosine-3'-phosphate
  modified_base 9: mod_base = OTHER; note = 2'-deoxy-2'-fluoroadenosine-3'-phosphate
  modified_base 10: mod_base = OTHER; note = 2'-deoxy-2'-fluoroguanosine-3'-phosphate
  modified_base 11: mod_base = OTHER; note = 2'-deoxy-2'-fluorouridine-3'-phosphate
  modified_base 12: mod_base = OTHER; note = 2'-O-methylguanosine-3'-phosphate
  modified_base 13: mod_base = OTHER; note = 2'-O-methyladenosine-3'-phosphate
  modified_base 14: mod_base = OTHER; note = 2'-O-methyladenosine-3'-phosphate
  modified_base 15: mod_base = OTHER; note = 2'-O-methyluridine-3'-phosphate
  modified_base 16: mod_base = OTHER; note = 2'-O-methyladenosine-3'-phosphate
  modified_base 17: mod_base = OTHER; note = 2'-O-methylcytidine-3'-phosphate
  modified_base 18: mod_base = OTHER; note = 2'-O-methyladenosine-3'-phosphate
  modified_base 19: mod_base = OTHER; note = 2'-O-methyluridine-3'-phosphorothioate
  modified_base 20: mod_base = OTHER; note = 2'-O-methylguanosine-3'-phosphorothioate
  modified_base 21: mod_base = OTHER; note = 2'-O-methyladenosine
ttcactgaagtgaatacatga

SEQ ID NO: 51 - RNA, 21 nt, synthetic construct
  source 1..21: mol_type = other RNA
  modified_base 1: mod_base = OTHER; note = 2'-O-methyluridine-3'-phosphorothioate
  modified_base 2: mod_base = OTHER; note = 2'-O-methyladenosine-3'-phosphorothioate
  modified_base 3: mod_base = OTHER; note = 2'-O-methyladenosine-3'-phosphate
  modified_base 4: mod_base = OTHER; note = 2'-O-methylguanosine-3'-phosphate
  modified_base 5: mod_base = OTHER; note = 2'-O-methyluridine-3'-phosphate
  modified_base 6: mod_base = OTHER; note = 2'-O-hexadecyl-guanosine-3'-phosphate
  modified_base 7: mod_base = OTHER; note = 2'-O-methyladenosine-3'-phosphate
  modified_base 8: mod_base = OTHER; note = 2'-O-methylcytidine-3'-phosphate
  modified_base 9: mod_base = OTHER; note = 2'-deoxy-2'-fluorouridine-3'-phosphate
  modified_base 10: mod_base = OTHER; note = 2'-deoxy-2'-fluoroadenosine-3'-phosphate
  modified_base 11: mod_base = OTHER; note = 2'-deoxy-2'-fluorocytidine-3'-phosphate
  modified_base 12: mod_base = OTHER; note = 2'-O-methylcytidine-3'-phosphate
  modified_base 13: mod_base = OTHER; note = 2'-O-methyladenosine-3'-phosphate
  modified_base 14: mod_base = OTHER; note = 2'-O-methylcytidine-3'-phosphate
  modified_base 15: mod_base = OTHER; note = 2'-O-methyluridine-3'-phosphate
  modified_base 16: mod_base = OTHER; note = 2'-O-methyluridine-3'-phosphate
  modified_base 17: mod_base = OTHER; note = 2'-O-methyladenosine-3'-phosphate
  modified_base 18: mod_base = OTHER; note = 2'-O-methyluridine-3'-phosphate
  modified_base 19: mod_base = OTHER; note = 2'-O-methyluridine-3'-phosphorothioate
  modified_base 20: mod_base = OTHER; note = 2'-O-methyluridine-3'-phosphorothioate
  modified_base 21: mod_base = OTHER; note = 2'-O-methyladenosine
taagtgactaccacttattta

SEQ ID NO: 52 - RNA, 21 nt, synthetic construct
  source 1..21: mol_type = other RNA
  modified_base 1: mod_base = OTHER; note = 2'-O-methylcytidine-3'-phosphorothioate
  modified_base 2: mod_base = OTHER; note = 2'-O-methyluridine-3'-phosphorothioate
  modified_base 3: mod_base = OTHER; note = 2'-O-methyladenosine-3'-phosphate
  modified_base 4: mod_base = OTHER; note = 2'-O-methylcytidine-3'-phosphate
  modified_base 5: mod_base = OTHER; note = 2'-O-methylcytidine-3'-phosphate
  modified_base 6: mod_base = OTHER; note = 2'-O-hexadecyl-adenosine-3'-phosphate
  modified_base 7: mod_base = OTHER; note = 2'-O-methylcytidine-3'-phosphate
  modified_base 8: mod_base = OTHER; note = 2'-O-methyluridine-3'-phosphate
  modified_base 9: mod_base = OTHER; note = 2'-deoxy-2'-fluorouridine-3'-phosphate
  modified_base 10: mod_base = OTHER; note = 2'-deoxy-2'-fluoroadenosine-3'-phosphate
  modified_base 11: mod_base = OTHER; note = 2'-deoxy-2'-fluorouridine-3'-phosphate
  modified_base 12: mod_base = OTHER; note = 2'-O-methyluridine-3'-phosphate
  modified_base 13: mod_base = OTHER; note = 2'-O-methyluridine-3'-phosphate
  modified_base 14: mod_base = OTHER; note = 2'-O-methylcytidine-3'-phosphate
  modified_base 15: mod_base = OTHER; note = 2'-O-methyluridine-3'-phosphate
  modified_base 16: mod_base = OTHER; note = 2'-O-methyladenosine-3'-phosphate
  modified_base 17: mod_base = OTHER; note = 2'-O-methyladenosine-3'-phosphate
  modified_base 18: mod_base = OTHER; note = 2'-O-methyladenosine-3'-phosphate
  modified_base 19: mod_base = OTHER; note = 2'-O-methyluridine-3'-phosphorothioate
  modified_base 20: mod_base = OTHER; note = 2'-O-methylcytidine-3'-phosphorothioate
  modified_base 21: mod_base = OTHER; note = 2'-O-methyladenosine
ctaccacttatttctaaatca

SEQ ID NO: 53 - RNA, 21 nt, synthetic construct
  source 1..21: mol_type = other RNA
  modified_base 1: mod_base = OTHER; note = 2'-O-methylcytidine-3'-phosphorothioate
  modified_base 2: mod_base = OTHER; note = 2'-O-methyluridine-3'-phosphorothioate
  modified_base 3: mod_base = OTHER; note = 2'-O-methyladenosine-3'-phosphate
  modified_base 4: mod_base = OTHER; note = 2'-O-methylcytidine-3'-phosphate
  modified_base 5: mod_base = OTHER; note = 2'-O-methylcytidine-3'-phosphate
  modified_base 6: mod_base = OTHER; note = 2'-O-hexadecyl-adenosine-3'-phosphate
  modified_base 7: mod_base = OTHER; note = 2'-deoxy-2'-fluorocytidine-3'-phosphate
  modified_base 8: mod_base = OTHER; note = 2'-O-methyluridine-3'-phosphate
  modified_base 9: mod_base = OTHER; note = 2'-deoxy-2'-fluorouridine-3'-phosphate
  modified_base 10: mod_base = OTHER; note = 2'-deoxy-2'-fluoroadenosine-3'-phosphate
  modified_base 11: mod_base = OTHER; note = 2'-deoxy-2'-fluorouridine-3'-phosphate
  modified_base 12: mod_base = OTHER; note = 2'-O-methyluridine-3'-phosphate
  modified_base 13: mod_base = OTHER; note = 2'-O-methyluridine-3'-phosphate
  modified_base 14: mod_base = OTHER; note = 2'-O-methylcytidine-3'-phosphate
  modified_base 15: mod_base = OTHER; note = 2'-O-methyluridine-3'-phosphate
  modified_base 16: mod_base = OTHER; note = 2'-O-methyladenosine-3'-phosphate
  modified_base 17: mod_base = OTHER; note = 2'-O-methyladenosine-3'-phosphate
  modified_base 18: mod_base = OTHER; note = 2'-O-methyladenosine-3'-phosphate
  modified_base 19: mod_base = OTHER; note = 2'-O-methyluridine-3'-phosphorothioate
  modified_base 20: mod_base = OTHER; note = 2'-O-methylcytidine-3'-phosphorothioate
  modified_base 21: mod_base = OTHER; note = 2'-O-methyladenosine
ctaccacttatttctaaatca

SEQ ID NO: 54 - RNA, 21 nt, synthetic construct
  source 1..21: mol_type = other RNA
  modified_base 1: mod_base = OTHER; note = 2'-O-methyluridine-3'-phosphorothioate
  modified_base 2: mod_base = OTHER; note = 2'-O-methyladenosine-3'-phosphorothioate
  modified_base 3: mod_base = OTHER; note = 2'-O-methyluridine-3'-phosphate
  modified_base 4: mod_base = OTHER; note = 2'-O-methylguanosine-3'-phosphate
  modified_base 5: mod_base = OTHER; note = 2'-O-methyluridine-3'-phosphate
  modified_base 6: mod_base = OTHER; note = 2'-O-hexadecyl-guanosine-3'-phosphate
  modified_base 7: mod_base = OTHER; note = 2'-O-methyladenosine-3'-phosphate
  modified_base 8: mod_base = OTHER; note = 2'-O-methylguanosine-3'-phosphate
  modified_base 9: mod_base = OTHER; note = 2'-deoxy-2'-fluorocytidine-3'-phosphate
  modified_base 10: mod_base = OTHER; note = 2'-deoxy-2'-fluoroadenosine-3'-phosphate
  modified_base 11: mod_base = OTHER; note = 2'-deoxy-2'-fluorouridine-3'-phosphate
  modified_base 12: mod_base = OTHER; note = 2'-O-methylguanosine-3'-phosphate
  modified_base 13: mod_base = OTHER; note = 2'-O-methyladenosine-3'-phosphate
  modified_base 14: mod_base = OTHER; note = 2'-O-methyladenosine-3'-phosphate
  modified_base 15: mod_base = OTHER; note = 2'-O-methyladenosine-3'-phosphate
  modified_base 16: mod_base = OTHER; note = 2'-O-methylcytidine-3'-phosphate
  modified_base 17: mod_base = OTHER; note = 2'-O-methyluridine-3'-phosphate
  modified_base 18: mod_base = OTHER; note = 2'-O-methyladenosine-3'-phosphate
  modified_base 19: mod_base = OTHER; note = 2'-O-methyluridine-3'-phosphorothioate
  modified_base 20: mod_base = OTHER; note = 2'-O-methylguanosine-3'-phosphorothioate
  modified_base 21: mod_base = OTHER; note = 2'-O-methyladenosine
tatgtgagcatgaaactatga

SEQ ID NO: 55 - RNA, 21 nt, synthetic construct
  source 1..21: mol_type = other RNA
  modified_base 1: mod_base = OTHER; note = 2'-O-methyladenosine-3'-phosphorothioate
  modified_base 2: mod_base = OTHER; note = 2'-O-methyladenosine-3'-phosphorothioate
  modified_base 3: mod_base = OTHER; note = 2'-O-methylcytidine-3'-phosphate
  modified_base 4: mod_base = OTHER; note = 2'-O-methyluridine-3'-phosphate
  modified_base 5: mod_base = OTHER; note = 2'-O-methyladenosine-3'-phosphate
  modified_base 6: mod_base = OTHER; note = 2'-O-hexadecyl-uridine-3'-phosphate
  modified_base 7: mod_base = OTHER; note = 2'-O-methylguanosine-3'-phosphate
  modified_base 8: mod_base = OTHER; note = 2'-O-methylcytidine-3'-phosphate
  modified_base 9: mod_base = OTHER; note = 2'-deoxy-2'-fluoroadenosine-3'-phosphate
  modified_base 10: mod_base = OTHER; note = 2'-deoxy-2'-fluorocytidine-3'-phosphate
  modified_base 11: mod_base = OTHER; note = 2'-deoxy-2'-fluorocytidine-3'-phosphate
  modified_base 12: mod_base = OTHER; note = 2'-O-methyluridine-3'-phosphate
  modified_base 13: mod_base = OTHER; note = 2'-O-methyladenosine-3'-phosphate
  modified_base 14: mod_base = OTHER; note = 2'-O-methyluridine-3'-phosphate
  modified_base 15: mod_base = OTHER; note = 2'-O-methyladenosine-3'-phosphate
  modified_base 16: mod_base = OTHER; note = 2'-O-methyladenosine-3'-phosphate
  modified_base 17: mod_base = OTHER; note = 2'-O-methyladenosine-3'-phosphate
  modified_base 18: mod_base = OTHER; note = 2'-O-methyluridine-3'-phosphate
  modified_base 19: mod_base = OTHER; note = 2'-O-methyladenosine-3'-phosphorothioate
  modified_base 20: mod_base = OTHER; note = 2'-O-methylcytidine-3'-phosphorothioate
  modified_base 21: mod_base = OTHER; note = 2'-O-methyladenosine
aactatgcacctataaataca

SEQ ID NO: 56 - DNA, 23 bp, synthetic construct
  source 1..23: mol_type = other DNA
  modified_base 1: mod_base = OTHER; note = 2'-O-methyluridine-3'-phosphorothioate 5'-(E)-Vinylphosphonate
  modified_base 2: mod_base = OTHER; note = 2'-deoxy-2'-fluorouridine-3'-phosphorothioate
  modified_base 3: mod_base = OTHER; note = 2'-O-methylguanosine-3'-phosphate
  modified_base 4: mod_base = OTHER; note = 2'-O-methyladenosine-3'-phosphate
  modified_base 6: mod_base = OTHER; note = 2'-O-methyluridine-3'-phosphate
  modified_base 7: mod_base = OTHER; note = Thymidine-glycol nucleic acid (GNA), S-Isomer
  modified_base 8: mod_base = OTHER; note = 2'-O-methylcytidine-3'-phosphate
  modified_base 9: mod_base = OTHER; note = 2'-O-methylcytidine-3'-phosphate
  modified_base 10: mod_base = OTHER; note = 2'-O-methyluridine-3'-phosphate
  modified_base 11: mod_base = OTHER; note = 2'-O-methyluridine-3'-phosphate
  modified_base 12: mod_base = OTHER; note = 2'-O-methyluridine-3'-phosphate
  modified_base 13: mod_base = OTHER; note = 2'-O-methyladenosine-3'-phosphate
  modified_base 14: mod_base = OTHER; note = 2'-deoxy-2'-fluorocytidine-3'-phosphate
  modified_base 15: mod_base = OTHER; note = 2'-O-methyladenosine-3'-phosphate
  modified_base 16: mod_base = OTHER; note = 2'-deoxy-2'-fluorocytidine-3'-phosphate
  modified_base 17: mod_base = OTHER; note = 2'-O-methylcytidine-3'-phosphate
  modified_base 18: mod_base = OTHER; note = 2'-O-methyladenosine-3'-phosphate
  modified_base 19: mod_base = OTHER; note = 2'-O-methylcytidine-3'-phosphate
  modified_base 20: mod_base = OTHER; note = 2'-O-methyladenosine-3'-phosphate
  modified_base 21: mod_base = OTHER; note = 2'-O-methylcytidine-3'-phosphorothioate
  modified_base 22: mod_base = OTHER; note = 2'-O-methyluridine-3'-phosphorothioate
  modified_base 23: mod_base = OTHER; note = 2'-O-methylguanosine
  misc_feature 1..4: note = RNA
  misc_feature 6..23: note = RNA
  misc_feature 5: note = DNA
ttgaattcctttacaccacactg

SEQ ID NO: 57 - DNA, 23 bp, synthetic construct
  source 1..23: mol_type = other DNA
  modified_base 1: mod_base = OTHER; note = 2'-O-methyluridine-3'-phosphorothioate 5'-(E)-Vinylphosphonate
  modified_base 2: mod_base = OTHER; note = 2'-deoxyadenosine-3'-phosphorothioate
  modified_base 3: mod_base = OTHER; note = 2'-O-methyluridine-3'-phosphate
  modified_base 4: mod_base = OTHER; note = 2'-O-methylguanosine-3'-phosphate
  modified_base 6: mod_base = OTHER; note = 2'-O-methyladenosine-3'-phosphate
  modified_base 8: mod_base = OTHER; note = 2'-O-methyluridine-3'-phosphate
  modified_base 9: mod_base = OTHER; note = 2'-O-methylcytidine-3'-phosphate
  modified_base 10: mod_base = OTHER; note = 2'-O-methylcytidine-3'-phosphate
  modified_base 11: mod_base = OTHER; note = 2'-O-methyluridine-3'-phosphate
  modified_base 13: mod_base = OTHER; note = 2'-O-methyluridine-3'-phosphate
  modified_base 14: mod_base = OTHER; note = 2'-deoxy-2'-fluoroadenosine-3'-phosphate
  modified_base 15: mod_base = OTHER; note = 2'-O-methylcytidine-3'-phosphate
  modified_base 16: mod_base = OTHER; note = 2'-O-methyladenosine-3'-phosphate
  modified_base 17: mod_base = OTHER; note = 2'-O-methylcytidine-3'-phosphate
  modified_base 18: mod_base = OTHER; note = 2'-O-methylcytidine-3'-phosphate
  modified_base 19: mod_base = OTHER; note = 2'-O-methyladenosine-3'-phosphate
  modified_base 20: mod_base = OTHER; note = 2'-O-methylcytidine-3'-phosphate
  modified_base 21: mod_base = OTHER; note = 2'-O-methyladenosine-3'-phosphorothioate
  modified_base 22: mod_base = OTHER; note = 2'-O-methylcytidine-3'-phosphorothioate
  modified_base 23: mod_base = OTHER; note = 2'-O-methyluridine
  misc_feature 1: note = RNA
  misc_feature 3..4: note = RNA
  misc_feature 6: note = RNA
  misc_feature 8..11: note = RNA
  misc_feature 13..23: note = RNA
  misc_feature 2: note = DNA
  misc_feature 5: note = DNA
  misc_feature 7: note = DNA
  misc_feature 12: note = DNA
tatgaattcctttacaccacact

SEQ ID NO: 58 - DNA, 23 bp, synthetic construct
  source 1..23: mol_type = other DNA
  modified_base 1: mod_base = OTHER; note = 2'-O-methyluridine-3'-phosphorothioate 5'-(E)-Vinylphosphonate
  modified_base 2: mod_base = OTHER; note = 2'-deoxycytidine-3'-phosphorothioate
  modified_base 3: mod_base = OTHER; note = 2'-O-methyluridine-3'-phosphate
  modified_base 4: mod_base = OTHER; note = 2'-O-methyladenosine-3'-phosphate
  modified_base 6: mod_base = OTHER; note = 2'-O-methyluridine-3'-phosphate
  modified_base 8: mod_base = OTHER; note = 2'-O-methyladenosine-3'-phosphate
  modified_base 9: mod_base = OTHER; note = 2'-O-methyladenosine-3'-phosphate
  modified_base 10: mod_base = OTHER; note = 2'-O-methyluridine-3'-phosphate
  modified_base 11: mod_base = OTHER; note = 2'-O-methyluridine-3'-phosphate
  modified_base 13: mod_base = OTHER; note = 2'-O-methylcytidine-3'-phosphate
  modified_base 14: mod_base = OTHER; note = 2'-deoxy-2'-fluorouridine-3'-phosphate
  modified_base 15: mod_base = OTHER; note = 2'-O-methyluridine-3'-phosphate
  modified_base 16: mod_base = OTHER; note = 2'-O-methyluridine-3'-phosphate
  modified_base 17: mod_base = OTHER; note = 2'-O-methyladenosine-3'-phosphate
  modified_base 18: mod_base = OTHER; note = 2'-O-methylcytidine-3'-phosphate
  modified_base 19: mod_base = OTHER; note = 2'-O-methyladenosine-3'-phosphate
  modified_base 20: mod_base = OTHER; note = 2'-O-methylcytidine-3'-phosphate
  modified_base 21: mod_base = OTHER; note = 2'-O-methylcytidine-3'-phosphorothioate
  modified_base 22: mod_base = OTHER; note = 2'-O-methyladenosine-3'-phosphorothioate
  modified_base 23: mod_base = OTHER; note = 2'-O-methylcytidine
  misc_feature 1: note = RNA
  misc_feature 3..4: note = RNA
  misc_feature 6: note = RNA
  misc_feature 8..11: note = RNA
  misc_feature 13..23: note = RNA
  misc_feature 2: note = DNA
  misc_feature 5: note = DNA
  misc_feature 7: note = DNA
  misc_feature 12: note = DNA
tctaatgaattcctttacaccac

SEQ ID NO: 59 - DNA, 23 bp, synthetic construct
  source 1..23: mol_type = other DNA
  modified_base 1: mod_base = OTHER; note = 2'-O-methyluridine-3'-phosphorothioate 5'-(E)-Vinylphosphonate
  modified_base 2: mod_base = OTHER; note = 2'-deoxythymidine-3'-phosphorothioate
  modified_base 3: mod_base = OTHER; note = 2'-O-methylguanosine-3'-phosphate
  modified_base 4: mod_base = OTHER; note = 2'-O-methyladenosine-3'-phosphate
  modified_base 6: mod_base = OTHER; note = 2'-O-methyluridine-3'-phosphate
  modified_base 8: mod_base = OTHER; note = 2'-O-methylcytidine-3'-phosphate
  modified_base 9: mod_base = OTHER; note = 2'-O-methyladenosine-3'-phosphate
  modified_base 10: mod_base = OTHER; note = 2'-O-methyluridine-3'-phosphate
  modified_base 11: mod_base = OTHER; note = 2'-O-methylcytidine-3'-phosphate
  modified_base 13: mod_base = OTHER; note = 2'-O-methyladenosine-3'-phosphate
  modified_base 14: mod_base = OTHER; note = 2'-deoxy-2'-fluorouridine-3'-phosphate
  modified_base 15: mod_base = OTHER; note = 2'-O-methylguanosine-3'-phosphate
  modified_base 16: mod_base = OTHER; note = 2'-O-methylguanosine-3'-phosphate
  modified_base 17: mod_base = OTHER; note = 2'-O-methylcytidine-3'-phosphate
  modified_base 18: mod_base = OTHER; note = 2'-O-methyluridine-3'-phosphate
  modified_base 19: mod_base = OTHER; note = 2'-O-methyladenosine-3'-phosphate
  modified_base 20: mod_base = OTHER; note = 2'-O-methyladenosine-3'-phosphate
  modified_base 21: mod_base = OTHER; note = 2'-O-methyluridine-3'-phosphorothioate
  modified_base 22: mod_base = OTHER; note = 2'-O-methylguanosine-3'-phosphorothioate
  modified_base 23: mod_base = OTHER; note = 2'-O-methyladenosine
  misc_feature 1: note = RNA
  misc_feature 3..4: note = RNA
  misc_feature 6: note = RNA
  misc_feature 8..11: note = RNA
  misc_feature 13..23: note = RNA
  misc_feature 2: note = DNA
  misc_feature 5: note = DNA
  misc_feature 7: note = DNA
  misc_feature 12: note = DNA
ttgaatacatccatggctaatga

SEQ ID NO: 60 - DNA, 23 bp, synthetic construct
  source 1..23: mol_type = other DNA
  modified_base 1: mod_base = OTHER; note = 2'-O-methyluridine-3'-phosphorothioate 5'-(E)-Vinylphosphonate
  modified_base 2: mod_base = OTHER; note = 2'-deoxyadenosine-3'-phosphorothioate
  modified_base 3: mod_base = OTHER; note = 2'-O-methyluridine-3'-phosphate
  modified_base 4: mod_base = OTHER; note = 2'-O-methylguanosine-3'-phosphate
  modified_base 6: mod_base = OTHER; note = 2'-O-methyladenosine-3'-phosphate
  modified_base 8: mod_base = OTHER; note = 2'-O-methyladenosine-3'-phosphate
  modified_base 9: mod_base = OTHER; note = 2'-O-methylcytidine-3'-phosphate
  modified_base 10: mod_base = OTHER; note = 2'-O-methyladenosine-3'-phosphate
  modified_base 11: mod_base = OTHER; note = 2'-O-methyluridine-3'-phosphate
  modified_base 13: mod_base = OTHER; note = 2'-O-methylcytidine-3'-phosphate
  modified_base 14: mod_base = OTHER; note = 2'-deoxy-2'-fluoroadenosine-3'-phosphate
  modified_base 15: mod_base = OTHER; note = 2'-O-methyluridine-3'-phosphate
  modified_base 16: mod_base = OTHER; note = 2'-O-methylguanosine-3'-phosphate
  modified_base 17: mod_base = OTHER; note = 2'-O-methylguanosine-3'-phosphate
  modified_base 18: mod_base = OTHER; note = 2'-O-methylcytidine-3'-phosphate
  modified_base 19: mod_base = OTHER; note = 2'-O-methyluridine-3'-phosphate
  modified_base 20: mod_base = OTHER; note = 2'-O-methyladenosine-3'-phosphate
  modified_base 21: mod_base = OTHER; note = 2'-O-methyladenosine-3'-phosphorothioate
  modified_base 22: mod_base = OTHER; note = 2'-O-methyluridine-3'-phosphorothioate
  modified_base 23: mod_base = OTHER; note = 2'-O-methylguanosine
  misc_feature 1: note = RNA
  misc_feature 3..4: note = RNA
  misc_feature 6: note = RNA
  misc_feature 8..11: note = RNA
  misc_feature 13..23: note = RNA
  misc_feature 2: note = DNA
  misc_feature 5: note = DNA
  misc_feature 7: note = DNA
  misc_feature 12: note = DNA
tatgaatacatccatggctaatg

SEQ ID NO: 61 - DNA, 23 bp, synthetic construct
  source 1..23: mol_type = other DNA
  modified_base 1: mod_base = OTHER; note = 2'-O-methyluridine-3'-phosphorothioate 5'-(E)-Vinylphosphonate
  modified_base 2: mod_base = OTHER; note = 2'-deoxythymidine-3'-phosphorothioate
  modified_base 3: mod_base = OTHER; note = 2'-O-methyluridine-3'-phosphate
  modified_base 4: mod_base = OTHER; note = 2'-O-methylguanosine-3'-phosphate
  modified_base 6: mod_base = OTHER; note = 2'-O-methyladenosine-3'-phosphate
  modified_base 8: mod_base = OTHER; note = 2'-O-methylguanosine-3'-phosphate
  modified_base 9: mod_base = OTHER; note = 2'-O-methyluridine-3'-phosphate
  modified_base 10: mod_base = OTHER; note = 2'-O-methylcytidine-3'-phosphate
  modified_base 11: mod_base = OTHER; note = 2'-O-methylcytidine-3'-phosphate
  modified_base 13: mod_base = OTHER; note = 2'-O-methyluridine-3'-phosphate
  modified_base 14: mod_base = OTHER; note = 2'-deoxy-2'-fluorouridine-3'-phosphate
  modified_base 15: mod_base = OTHER; note = 2'-O-methylcytidine-3'-phosphate
  modified_base 16: mod_base = OTHER; note = 2'-O-methyladenosine-3'-phosphate
  modified_base 17: mod_base = OTHER; note = 2'-O-methyluridine-3'-phosphate
  modified_base 18: mod_base = OTHER; note = 2'-O-methylguanosine-3'-phosphate
  modified_base 19: mod_base = OTHER; note = 2'-O-methyladenosine-3'-phosphate
  modified_base 20: mod_base = OTHER; note = 2'-O-methyladenosine-3'-phosphate
  modified_base 21: mod_base = OTHER; note = 2'-O-methyluridine-3'-phosphorothioate
  modified_base 22: mod_base = OTHER; note = 2'-O-methyladenosine-3'-phosphorothioate
  modified_base 23: mod_base = OTHER; note = 2'-O-methylcytidine
  misc_feature 1: note = RNA
  misc_feature 3..4: note = RNA
  misc_feature 6: note = RNA
  misc_feature 8..11: note = RNA
  misc_feature 13..23: note = RNA
  misc_feature 2: note = DNA
  misc_feature 5: note = DNA
  misc_feature 7: note = DNA
  misc_feature 12: note = DNA
tttgaaagtcctttcatgaatac

SEQ ID NO: 62 - DNA, 23 bp, synthetic construct
  source 1..23: mol_type = other DNA
  modified_base 1: mod_base = OTHER; note = 2'-O-methyluridine-3'-phosphorothioate 5'-(E)-Vinylphosphonate
  modified_base 2: mod_base = OTHER; note = 2'-deoxycytidine-3'-phosphorothioate
  modified_base 3: mod_base = OTHER; note = 2'-O-methyluridine-3'-phosphate
  modified_base 4: mod_base = OTHER; note = 2'-O-methyluridine-3'-phosphate
  modified_base 6: mod_base = OTHER; note = 2'-O-methylguanosine-3'-phosphate
  modified_base 8: mod_base = OTHER; note = 2'-O-methyladenosine-3'-phosphate
  modified_base 9: mod_base = OTHER; note = 2'-O-methyladenosine-3'-phosphate
  modified_base 10: mod_base = OTHER; note = 2'-O-methylguanosine-3'-phosphate
  modified_base 11: mod_base = OTHER; note = 2'-O-methyluridine-3'-phosphate
  modified_base 13: mod_base = OTHER; note = 2'-O-methylcytidine-3'-phosphate
  modified_base 14: mod_base = OTHER; note = 2'-deoxy-2'-fluorouridine-3'-phosphate
  modified_base 15: mod_base = OTHER; note = 2'-O-methyluridine-3'-phosphate
  modified_base 16: mod_base = OTHER; note = 2'-O-methyluridine-3'-phosphate
  modified_base 17: mod_base = OTHER; note = 2'-O-methylcytidine-3'-phosphate
  modified_base 18: mod_base = OTHER; note = 2'-O-methyladenosine-3'-phosphate
  modified_base 19: mod_base = OTHER; note = 2'-O-methyluridine-3'-phosphate
  modified_base 20: mod_base = OTHER; note = 2'-O-methylguanosine-3'-phosphate
  modified_base 21: mod_base = OTHER; note = 2'-O-methyladenosine-3'-phosphorothioate
  modified_base 22: mod_base = OTHER; note = 2'-O-methyladenosine-3'-phosphorothioate
  modified_base 23: mod_base = OTHER; note = 2'-O-methyluridine
  misc_feature 1: note = RNA
  misc_feature 3..4: note = RNA
  misc_feature 6: note = RNA
  misc_feature 8..11: note = RNA
  misc_feature 13..23: note = RNA
  misc_feature 2: note = DNA
  misc_feature 5: note = DNA
  misc_feature 7: note = DNA
  misc_feature 12: note = DNA
tctttgaaagtcctttcatgaat

SEQ ID NO: 63 - DNA, 23 bp, synthetic construct
  source 1..23: mol_type = other DNA
  modified_base 1: mod_base = OTHER; note = 2'-O-methyluridine-3'-phosphorothioate 5'-(E)-Vinylphosphonate
  modified_base 2: mod_base = OTHER; note = 2'-deoxyadenosine-3'-phosphorothioate
  modified_base 3: mod_base = OTHER; note = 2'-O-methyladenosine-3'-phosphate
  modified_base 4: mod_base = OTHER; note = 2'-O-methylcytidine-3'-phosphate
  modified_base 6: mod_base = OTHER; note = 2'-O-methyluridine-3'-phosphate
  modified_base 8: mod_base = OTHER; note = 2'-O-methyluridine-3'-phosphate
  modified_base 9: mod_base = OTHER; note = 2'-O-methylguanosine-3'-phosphate
  modified_base 10: mod_base = OTHER; note = 2'-O-methyluridine-3'-phosphate
  modified_base 11: mod_base = OTHER; note = 2'-O-methylcytidine-3'-phosphate
  modified_base 13: mod_base = OTHER; note = 2'-O-methylcytidine-3'-phosphate
  modified_base 14: mod_base = OTHER; note = 2'-deoxy-2'-fluorouridine-3'-phosphate
  modified_base 15: mod_base = OTHER; note = 2'-O-methyluridine-3'-phosphate
  modified_base 16: mod_base = OTHER; note = 2'-O-methylguanosine-3'-phosphate
  modified_base 17: mod_base = OTHER; note = 2'-O-methylcytidine-3'-phosphate
  modified_base 18: mod_base = OTHER; note = 2'-O-methyluridine-3'-phosphate
  modified_base 19: mod_base = OTHER; note = 2'-O-methylcytidine-3'-phosphate
  modified_base 20: mod_base = OTHER; note = 2'-O-methyluridine-3'-phosphate
  modified_base 21: mod_base = OTHER; note = 2'-O-methyluridine-3'-phosphorothioate
  modified_base 22: mod_base = OTHER; note = 2'-O-methyluridine-3'-phosphorothioate
  modified_base 23: mod_base = OTHER; note = 2'-O-methylguanosine
  misc_feature 1: note = RNA
  misc_feature 3..4: note = RNA
  misc_feature 6: note = RNA
  misc_feature 8..11: note = RNA
  misc_feature 13..23: note = RNA
  misc_feature 2: note = DNA
  misc_feature 5: note = DNA
  misc_feature 7: note = DNA
  misc_feature 12: note = DNA
taacatttgtcacttgctctttg

SEQ ID NO: 64 - DNA, 23 bp, synthetic construct
  source 1..23: mol_type = other DNA
  modified_base 1: mod_base = OTHER; note = 2'-O-methyluridine-3'-phosphorothioate 5'-(E)-Vinylphosphonate
  modified_base 2: mod_base = OTHER; note = 2'-deoxycytidine-3'-phosphorothioate
  modified_base 3: mod_base = OTHER; note = 2'-O-methylcytidine-3'-phosphate
  modified_base 4: mod_base = OTHER; note = 2'-O-methyladenosine-3'-phosphate
  modified_base 6: mod_base = OTHER; note = 2'-O-methylcytidine-3'-phosphate
  modified_base 8: mod_base = OTHER; note = 2'-O-methyluridine-3'-phosphate
  modified_base 9: mod_base = OTHER; note = 2'-O-methyluridine-3'-phosphate
  modified_base 10: mod_base = OTHER; note = 2'-O-methyluridine-3'-phosphate
  modified_base 11: mod_base = OTHER; note = 2'-O-methylguanosine-3'-phosphate
  modified_base 13: mod_base = OTHER; note = 2'-O-methylcytidine-3'-phosphate
  modified_base 14: mod_base = OTHER; note = 2'-deoxy-2'-fluoroadenosine-3'-phosphate
  modified_base 15: mod_base = OTHER; note = 2'-O-methylcytidine-3'-phosphate
  modified_base 16: mod_base = OTHER; note = 2'-O-methyluridine-3'-phosphate
  modified_base 17: mod_base = OTHER; note = 2'-O-methyluridine-3'-phosphate
  modified_base 18: mod_base = OTHER; note = 2'-O-methylguanosine-3'-phosphate
  modified_base 19: mod_base = OTHER; note = 2'-O-methylcytidine-3'-phosphate
  modified_base 20: mod_base = OTHER; note = 2'-O-methyluridine-3'-phosphate
  modified_base 21: mod_base = OTHER; note = 2'-O-methylcytidine-3'-phosphorothioate
  modified_base 22: mod_base = OTHER; note = 2'-O-methyluridine-3'-phosphorothioate
  modified_base 23: mod_base = OTHER; note = 2'-O-methyluridine
  misc_feature 1: note = RNA
  misc_feature 3..4: note = RNA
  misc_feature 6: note = RNA
  misc_feature 8..11: note = RNA
  misc_feature 13..23: note = RNA
  misc_feature 2: note = DNA
  misc_feature 5: note = DNA
  misc_feature 7: note = DNA
  misc_feature 12: note = DNA
tccaacatttgtcacttgctctt

SEQ ID NO: 65 - DNA, 23 bp, synthetic construct
  source 1..23: mol_type = other DNA
  modified_base 1: mod_base = OTHER; note = 2'-O-methyluridine-3'-phosphorothioate 5'-(E)-Vinylphosphonate
  modified_base 2: mod_base = OTHER; note = 2'-deoxythymidine-3'-phosphorothioate
  modified_base 3: mod_base = OTHER; note = 2'-O-methyluridine-3'-phosphate
  modified_base 4: mod_base = OTHER; note = 2'-O-methylcytidine-3'-phosphate
  modified_base 6: mod_base = OTHER; note = 2'-O-methyluridine-3'-phosphate
  modified_base 8: mod_base = OTHER; note = 2'-O-methylguanosine-3'-phosphate
  modified_base 9: mod_base = OTHER; note = 2'-O-methyluridine-3'-phosphate
  modified_base 10: mod_base = OTHER; note = 2'-O-methylcytidine-3'-phosphate
  modified_base 11: mod_base = OTHER; note = 2'-O-methyluridine-3'-phosphate
  modified_base 13: mod_base = OTHER; note = 2'-O-methylguanosine-3'-phosphate
  modified_base 14: mod_base = OTHER; note = 2'-deoxy-2'-fluoroadenosine-3'-phosphate
  modified_base 15: mod_base = OTHER; note = 2'-O-methyluridine-3'-phosphate
  modified_base 16: mod_base = OTHER; note = 2'-O-methyladenosine-3'-phosphate
  modified_base 17: mod_base = OTHER; note = 2'-O-methylcytidine-3'-phosphate
  modified_base 18: mod_base = OTHER; note = 2'-O-methylcytidine-3'-phosphate
  modified_base 19: mod_base = OTHER; note = 2'-O-methylcytidine-3'-phosphate
  modified_base 20: mod_base = OTHER; note = 2'-O-methyluridine-3'-phosphate
  modified_base 21: mod_base = OTHER; note = 2'-O-methyluridine-3'-phosphorothioate
  modified_base 22: mod_base = OTHER; note = 2'-O-methylcytidine-3'-phosphorothioate
  modified_base 23: mod_base = OTHER; note = 2'-O-methylcytidine
  misc_feature 1: note = RNA
  misc_feature 3..4: note = RNA
  misc_feature 6: note = RNA
  misc_feature 8..11: note = RNA
  misc_feature 13..23: note = RNA
  misc_feature 2: note = DNA
  misc_feature 5: note = DNA
  misc_feature 7: note = DNA
  misc_feature 12: note = DNA
tttcgtagtcttgatacccttcc

SEQ ID NO: 66 - DNA, 23 bp, synthetic construct
  source 1..23: mol_type = other DNA
  modified_base 1: mod_base = OTHER; note = 2'-O-methyluridine-3'-phosphorothioate 5'-(E)-Vinylphosphonate
  modified_base 2: mod_base = OTHER; note = 2'-deoxyadenosine-3'-phosphorothioate
  modified_base 3: mod_base = OTHER; note = 2'-O-methylguanosine-3'-phosphate
  modified_base 4: mod_base = OTHER; note = 2'-O-methyladenosine-3'-phosphate
  modified_base 6: mod_base = OTHER; note = 2'-O-methyladenosine-3'-phosphate
  modified_base 8: mod_base = OTHER; note = 2'-O-methyluridine-3'-phosphate
  modified_base 9: mod_base = OTHER; note = 2'-O-methyluridine-3'-phosphate
  modified_base 10: mod_base = OTHER; note = 2'-O-methylcytidine-3'-phosphate
  modified_base 11: mod_base = OTHER; note = 2'-O-methyluridine-3'-phosphate
  modified_base 13: mod_base = OTHER; note = 2'-O-methyladenosine-3'-phosphate
  modified_base 14: mod_base = OTHER; note = 2'-deoxy-2'-fluoroguanosine-3'-phosphate
  modified_base 15: mod_base = OTHER; note = 2'-O-methylguanosine-3'-phosphate
  modified_base 16: mod_base = OTHER; note = 2'-O-methylcytidine-3'-phosphate
  modified_base 17: mod_base = OTHER; note = 2'-O-methyluridine-3'-phosphate
  modified_base 18: mod_base = OTHER; note = 2'-O-methyluridine-3'-phosphate
  modified_base 19: mod_base = OTHER; note = 2'-O-methylcytidine-3'-phosphate
  modified_base 20: mod_base = OTHER; note = 2'-O-methyladenosine-3'-phosphate
  modified_base 21: mod_base = OTHER; note = 2'-O-methylguanosine-3'-phosphorothioate
  modified_base 22: mod_base = OTHER; note = 2'-O-methylguanosine-3'-phosphorothioate
  modified_base 23: mod_base = OTHER; note = 2'-O-methyluridine
  misc_feature 1: note = RNA
  misc_feature 3..4: note = RNA
  misc_feature 6: note = RNA
  misc_feature 8..11: note = RNA
  misc_feature 13..23: note = RNA
  misc_feature 2: note = DNA
  misc_feature 5: note = DNA
  misc_feature 7: note = DNA
  misc_feature 12: note = DNA
tagatatttcttaggcttcaggt

SEQ ID NO: 67 - DNA, 23 bp, synthetic construct
  source 1..23: mol_type = other DNA
  modified_base 1: mod_base = OTHER; note = 2'-O-methyluridine-3'-phosphorothioate 5'-(E)-Vinylphosphonate
  modified_base 2: mod_base = OTHER; note = 2'-deoxyadenosine-3'-phosphorothioate
  modified_base 3: mod_base = OTHER; note = 2'-O-methyladenosine-3'-phosphate
  modified_base 4: mod_base = OTHER; note = 2'-O-methylguanosine-3'-phosphate
  modified_base 6: mod_base = OTHER; note = 2'-O-methyluridine-3'-phosphate
  modified_base 8: mod_base = OTHER; note = 2'-O-methyluridine-3'-phosphate
  modified_base 9: mod_base = OTHER; note = 2'-O-methyluridine-3'-phosphate
  modified_base 10: mod_base = OTHER; note = 2'-O-methyluridine-3'-phosphate
  modified_base 11: mod_base = OTHER; note = 2'-O-methylcytidine-3'-phosphate
  modified_base 13: mod_base = OTHER; note = 2'-O-methyluridine-3'-phosphate
  modified_base 14: mod_base = OTHER; note = 2'-deoxy-2'-fluoroadenosine-3'-phosphate
  modified_base 15: mod_base = OTHER; note = 2'-O-methylguanosine-3'-phosphate
  modified_base 16: mod_base = OTHER; note = 2'-O-methylguanosine-3'-phosphate
  modified_base 17: mod_base = OTHER; note = 2'-O-methylcytidine-3'-phosphate
  modified_base 18: mod_base = OTHER; note = 2'-O-methyluridine-3'-phosphate
  modified_base 19: mod_base = OTHER; note = 2'-O-methyluridine-3'-phosphate
  modified_base 20: mod_base = OTHER; note = 2'-O-methylcytidine-3'-phosphate
  modified_base 21: mod_base = OTHER; note = 2'-O-methyladenosine-3'-phosphorothioate
  modified_base 22: mod_base = OTHER; note = 2'-O-methylguanosine-3'-phosphorothioate
  modified_base 23: mod_base = OTHER; note = 2'-O-methylguanosine
  misc_feature 1: note = RNA
  misc_feature 3..4: note = RNA
  misc_feature 6: note = RNA
  misc_feature 8..11: note = RNA
  misc_feature 13..23: note = RNA
  misc_feature 2: note = DNA
  misc_feature 5: note = DNA
  misc_feature 7: note = DNA
  misc_feature 12: note = DNA
taagatatttcttaggcttcagg

SEQ ID NO: 68 - DNA, 23 bp, synthetic construct
  source 1..23: mol_type = other DNA
  modified_base 1: mod_base = OTHER; note = 2'-O-methyluridine-3'-phosphorothioate 5'-(E)-Vinylphosphonate
  modified_base 2: mod_base = OTHER; note = 2'-deoxycytidine-3'-phosphorothioate
  modified_base 3: mod_base = OTHER; note = 2'-O-methyladenosine-3'-phosphate
  modified_base 4: mod_base = OTHER; note = 2'-O-methyladenosine-3'-phosphate
  modified_base 6: mod_base = OTHER; note = 2'-O-methylguanosine-3'-phosphate
  modified_base 8: mod_base = OTHER; note = 2'-O-methyluridine-3'-phosphate
  modified_base 9: mod_base = OTHER; note = 2'-O-methyladenosine-3'-phosphate
  modified_base 10: mod_base = OTHER; note = 2'-O-methyluridine-3'-phosphate
  modified_base 11: mod_base = OTHER; note = 2'-O-methyluridine-3'-phosphate
  modified_base 13: mod_base = OTHER; note = 2'-O-methylcytidine-3'-phosphate
  modified_base 14: mod_base = OTHER; note = 2'-deoxy-2'-fluorouridine-3'-phosphate
  modified_base 15: mod_base = OTHER; note = 2'-O-methyluridine-3'-phosphate
  modified_base 16: mod_base = OTHER; note = 2'-O-methyladenosine-3'-phosphate
  modified_base 17: mod_base = OTHER; note = 2'-O-methylguanosine-3'-phosphate
  modified_base 18: mod_base = OTHER; note = 2'-O-methylguanosine-3'-phosphate
  modified_base 19: mod_base = OTHER; note = 2'-O-methylcytidine-3'-phosphate
  modified_base 20: mod_base = OTHER; note = 2'-O-methyluridine-3'-phosphate
  modified_base 21: mod_base = OTHER; note = 2'-O-methyluridine-3'-phosphorothioate
  modified_base 22: mod_base = OTHER; note = 2'-O-methylcytidine-3'-phosphorothioate
  modified_base 23: mod_base = OTHER; note = 2'-O-methyladenosine
  misc_feature 1: note = RNA
  misc_feature 3..4: note = RNA
  misc_feature 6: note = RNA
  misc_feature 8..11: note = RNA
  misc_feature 13..23: note = RNA
  misc_feature 2: note = DNA
  misc_feature 5: note = DNA
  misc_feature 7: note = DNA
  misc_feature 12: note = DNA
tcaaagatatttcttaggcttca

SEQ ID NO: 69 - DNA, 23 bp, synthetic construct
  source 1..23: mol_type = other DNA
  modified_base 1: mod_base = OTHER; note = 2'-O-methyluridine-3'-phosphorothioate 5'-(E)-Vinylphosphonate
  modified_base 2: mod_base = OTHER; note = 2'-deoxyguanosine-3'-phosphorothioate
  modified_base 3: mod_base = OTHER; note = 2'-O-methyladenosine-3'-phosphate
  modified_base 4: mod_base = OTHER; note = 2'-O-methylguanosine-3'-phosphate
  modified_base 6: mod_base = OTHER; note = 2'-O-methyladenosine-3'-phosphate
  modified_base 8: mod_base = OTHER; note = 2'-O-methyladenosine-3'-phosphate
  modified_base 9: mod_base = OTHER; note = 2'-O-methylguanosine-3'-phosphate
  modified_base 10: mod_base = OTHER; note = 2'-O-methyladenosine-3'-phosphate
  modified_base 11: mod_base = OTHER; note = 2'-O-methyluridine-3'-phosphate
  modified_base 13: mod_base = OTHER; note = 2'-O-methyluridine-3'-phosphate
  modified_base 14: mod_base = OTHER; note = 2'-deoxy-2'-fluorouridine-3'-phosphate
  modified_base 15: mod_base = OTHER; note = 2'-O-methyluridine-3'-phosphate
  modified_base 16: mod_base = OTHER; note = 2'-O-methylcytidine-3'-phosphate
  modified_base 17: mod_base = OTHER; note = 2'-O-methyluridine-3'-phosphate
  modified_base 18: mod_base = OTHER; note = 2'-O-methyluridine-3'-phosphate
  modified_base 19: mod_base = OTHER; note = 2'-O-methyladenosine-3'-phosphate
  modified_base 20: mod_base = OTHER; note = 2'-O-methylguanosine-3'-phosphate
  modified_base 21: mod_base = OTHER; note = 2'-O-methylguanosine-3'-phosphorothioate
  modified_base 22: mod_base = OTHER; note = 2'-O-methylcytidine-3'-phosphorothioate
  modified_base 23: mod_base = OTHER; note = 2'-O-methyluridine
  misc_feature 1: note = RNA
  misc_feature 3..4: note = RNA
  misc_feature 6: note = RNA
  misc_feature 8..11: note = RNA
  misc_feature 13..23: note = RNA
  misc_feature 2: note = DNA
  misc_feature 5: note = DNA
  misc_feature 7: note = DNA
  misc_feature 12: note = DNA
tgagcaaagatatttcttaggct

SEQ ID NO: 70 - DNA, 23 bp, synthetic construct
  source 1..23: mol_type = other DNA
  modified_base 1: mod_base = OTHER; note = 2'-O-methyluridine-3'-phosphorothioate 5'-(E)-Vinylphosphonate
  modified_base 2: mod_base = OTHER; note = 2'-deoxycytidine-3'-phosphorothioate
  modified_base 3: mod_base = OTHER; note = 2'-O-methyladenosine-3'-phosphate
  modified_base 4: mod_base = OTHER; note = 2'-O-methyladenosine-3'-phosphate
  modified_base 6: mod_base = OTHER; note = 2'-O-methyladenosine-3'-phosphate
  modified_base 8: mod_base = OTHER; note = 2'-O-methyladenosine-3'-phosphate
  modified_base 9: mod_base = OTHER; note = 2'-O-methylcytidine-3'-phosphate
  modified_base 10: mod_base = OTHER; note = 2'-O-methyluridine-3'-phosphate
  modified_base 11: mod_base = OTHER; note = 2'-O-methylguanosine-3'-phosphate
  modified_base 13: mod_base = OTHER; note = 2'-O-methylguanosine-3'-phosphate
  modified_base 14: mod_base = OTHER; note = 2'-deoxy-2'-fluoroadenosine-3'-phosphate
  modified_base 15: mod_base = OTHER; note = 2'-O-methylguanosine-3'-phosphate
  modified_base 16: mod_base = OTHER; note = 2'-O-methylcytidine-3'-phosphate
  modified_base 17: mod_base = OTHER; note = 2'-O-methyladenosine-3'-phosphate
  modified_base 18: mod_base = OTHER; note = 2'-O-methyladenosine-3'-phosphate
  modified_base 19: mod_base = OTHER; note = 2'-O-methyladenosine-3'-phosphate
  modified_base 20: mod_base = OTHER; note = 2'-O-methylguanosine-3'-phosphate
  modified_base 21: mod_base = OTHER; note = 2'-O-methyladenosine-3'-phosphorothioate
  modified_base 22: mod_base = OTHER; note = 2'-O-methyluridine-3'-phosphorothioate
  modified_base 23: mod_base = OTHER; note = 2'-O-methyladenosine
  misc_feature 1: note = RNA
  misc_feature 3..4: note = RNA
  misc_feature 6: note = RNA
  misc_feature 8..11: note = RNA
  misc_feature 13..23: note = RNA
  misc_feature 2: note = DNA
  misc_feature 5: note = DNA
  misc_feature 7: note = DNA
  misc_feature 12: note = DNA
tcaagaaactgggagcaaagata

SEQ ID NO: 71 - DNA, 23 bp, synthetic construct
  source 1..23: mol_type = other DNA
  modified_base 1: mod_base = OTHER; note = 2'-O-methyluridine-3'-phosphorothioate 5'-(E)-Vinylphosphonate
  modified_base 2: mod_base = OTHER; note = 2'-deoxycytidine-3'-phosphorothioate
  modified_base 3: mod_base = OTHER; note = 2'-O-methyladenosine-3'-phosphate
  modified_base 4: mod_base = OTHER; note = 2'-O-methyladenosine-3'-phosphate
  modified_base 6: mod_base = OTHER; note = 2'-O-methyladenosine-3'-phosphate
  modified_base 8: mod_base = OTHER; note = 2'-O-methyladenosine-3'-phosphate
  modified_base 9: mod_base = OTHER; note = 2'-O-methylcytidine-3'-phosphate
  modified_base 10: mod_base = OTHER; note = 2'-O-methyluridine-3'-phosphate
  modified_base 11: mod_base = OTHER; note = 2'-O-methylguanosine-3'-phosphate
  modified_base 13: mod_base = OTHER; note = 2'-O-methylguanosine-3'-phosphate
  modified_base 14: mod_base = OTHER; note = 2'-deoxy-2'-fluoroadenosine-3'-phosphate
  modified_base 15: mod_base = OTHER; note = 2'-O-methylguanosine-3'-phosphate
  modified_base 16: mod_base = OTHER; note = 2'-O-methylcytidine-3'-phosphate
  modified_base 17: mod_base = OTHER; note = 2'-O-methyladenosine-3'-phosphate
  modified_base 18: mod_base = OTHER; note = 2'-O-methyladenosine-3'-phosphate
  modified_base 19: mod_base = OTHER; note = 2'-O-methyladenosine-3'-phosphate
  modified_base 20: mod_base = OTHER; note = 2'-O-methylguanosine-3'-phosphate
  modified_base 21: mod_base = OTHER; note = 2'-O-methyladenosine-3'-phosphorothioate
  modified_base 22: mod_base = OTHER; note = 2'-O-methyluridine-3'-phosphorothioate
  modified_base 23: mod_base = OTHER; note = 2'-O-methyladenosine
  misc_feature 1: note = RNA
  misc_feature 3..4: note = RNA
  misc_feature 6: note = RNA
  misc_feature 8..11: note = RNA
  misc_feature 13..23: note = RNA
  misc_feature 2: note = DNA
  misc_feature 5: note = DNA
  misc_feature 7: note = DNA
  misc_feature 12: note = DNA
tcaagaaactgggagcaaagata

SEQ ID NO: 72 - DNA, 23 bp, synthetic construct
  source 1..23: mol_type = other DNA
  modified_base 1: mod_base = OTHER; note = 2'-O-methyluridine-3'-phosphorothioate 5'-(E)-Vinylphosphonate
  modified_base 2: mod_base = OTHER; note = 2'-deoxythymidine-3'-phosphorothioate
  modified_base 3: mod_base = OTHER; note = 2'-O-methylcytidine-3'-phosphate
  modified_base 4: mod_base = OTHER; note = 2'-O-methyladenosine-3'-phosphate
  modified_base 6: mod_base = OTHER; note = 2'-O-methylguanosine-3'-phosphate
  modified_base 8: mod_base = OTHER; note = 2'-O-methyladenosine-3'-phosphate
  modified_base 9: mod_base = OTHER; note = 2'-O-methyladenosine-3'-phosphate
  modified_base 10: mod_base = OTHER; note = 2'-O-methylcytidine-3'-phosphate
  modified_base 11: mod_base = OTHER; note = 2'-O-methyluridine-3'-phosphate
  modified_base 13: mod_base = OTHER; note = 2'-O-methylguanosine-3'-phosphate
  modified_base 14: mod_base = OTHER; note = 2'-deoxy-2'-fluoroguanosine-3'-phosphate
  modified_base 15: mod_base = OTHER; note = 2'-O-methyladenosine-3'-phosphate
  modified_base 16: mod_base = OTHER; note = 2'-O-methylguanosine-3'-phosphate
  modified_base 17: mod_base = OTHER; note = 2'-O-methylcytidine-3'-phosphate
  modified_base 18: mod_base = OTHER; note = 2'-O-methyladenosine-3'-phosphate
  modified_base 19: mod_base = OTHER; note = 2'-O-methyladenosine-3'-phosphate
  modified_base 20: mod_base = OTHER; note = 2'-O-methyladenosine-3'-phosphate
  modified_base 21: mod_base = OTHER; note = 2'-O-methylguanosine-3'-phosphorothioate
  modified_base 22: mod_base = OTHER; note = 2'-O-methyladenosine-3'-phosphorothioate
  modified_base 23: mod_base = OTHER; note = 2'-O-methyluridine
  misc_feature 1: note = RNA
  misc_feature 3..4: note = RNA
  misc_feature 6: note = RNA
  misc_feature 8..11: note = RNA
  misc_feature 13..23: note = RNA
  misc_feature 2: note = DNA
  misc_feature 5: note = DNA
  misc_feature 7: note = DNA
  misc_feature 12: note = DNA
ttcaagaaactgggagcaaagat

SEQ ID NO: 73 - DNA, 23 bp, synthetic construct
  source 1..23: mol_type = other DNA
  modified_base 1: mod_base = OTHER; note = 2'-O-methyluridine-3'-phosphorothioate 5'-(E)-Vinylphosphonate
  modified_base 2: mod_base = OTHER; note = 2'-deoxycytidine-3'-phosphorothioate
  modified_base 3: mod_base = OTHER; note = 2'-O-methyluridine-3'-phosphate
  modified_base 4: mod_base = OTHER; note = 2'-O-methylcytidine-3'-phosphate
  modified_base 6: mod_base = OTHER; note = 2'-O-methyladenosine-3'-phosphate
  modified_base 8: mod_base = OTHER; note = 2'-O-methyladenosine-3'-phosphate
  modified_base 9: mod_base = OTHER; note = 2'-O-methyladenosine-3'-phosphate
  modified_base 10: mod_base = OTHER; note = 2'-O-methyladenosine-3'-phosphate
  modified_base 11: mod_base = OTHER; note = 2'-O-methylcytidine-3'-phosphate
  modified_base 13: mod_base = OTHER; note = 2'-O-methylguanosine-3'-phosphate
  modified_base 14: mod_base = OTHER; note = 2'-deoxy-2'-fluoroguanosine-3'-phosphate
  modified_base 15: mod_base = OTHER; note = 2'-O-methylguanosine-3'-phosphate
  modified_base 16: mod_base = OTHER; note = 2'-O-methyladenosine-3'-phosphate
  modified_base 17: mod_base = OTHER; note = 2'-O-methylguanosine-3'-phosphate
  modified_base 18: mod_base = OTHER; note = 2'-O-methylcytidine-3'-phosphate
  modified_base 19: mod_base = OTHER; note = 2'-O-methyladenosine-3'-phosphate
  modified_base 20: mod_base = OTHER; note = 2'-O-methyladenosine-3'-phosphate
  modified_base 21: mod_base = OTHER; note = 2'-O-methyladenosine-3'-phosphorothioate
  modified_base 22: mod_base = OTHER; note = 2'-O-methylguanosine-3'-phosphorothioate
  modified_base 23: mod_base = OTHER; note = 2'-O-methyladenosine
  misc_feature 1: note = RNA
  misc_feature 3..4: note = RNA
  misc_feature 6: note = RNA
  misc_feature 8..11: note = RNA
  misc_feature 13..23: note = RNA
  misc_feature 2: note = DNA
  misc_feature 5: note = DNA
  misc_feature 7: note = DNA
  misc_feature 12: note = DNA
tctcaagaaactgggagcaaaga

SEQ ID NO: 74 - DNA, 23 bp, synthetic construct
  source 1..23: mol_type = other DNA
  modified_base 1: mod_base = OTHER; note = 2'-O-methyluridine-3'-phosphorothioate 5'-(E)-Vinylphosphonate
  modified_base 2: mod_base = OTHER; note = 2'-deoxycytidine-3'-phosphorothioate
  modified_base 3: mod_base = OTHER; note = 2'-O-methyladenosine-3'-phosphate
  modified_base 4: mod_base = OTHER; note = 2'-O-methylguanosine-3'-phosphate
  modified_base 6: mod_base = OTHER; note = 2'-O-methyluridine-3'-phosphate
  modified_base 8: mod_base = OTHER; note = 2'-O-methyluridine-3'-phosphate
  modified_base 9: mod_base = OTHER; note = 2'-O-methylcytidine-3'-phosphate
  modified_base 10: mod_base = OTHER; note = 2'-O-methyladenosine-3'-phosphate
  modified_base 11: mod_base = OTHER; note = 2'-O-methyladenosine-3'-phosphate
  modified_base 13: mod_base = OTHER; note = 2'-O-methyladenosine-3'-phosphate
  modified_base 14: mod_base = OTHER; note = 2'-deoxy-2'-fluoroadenosine-3'-phosphate
  modified_base 15: mod_base = OTHER; note = 2'-O-methyladenosine-3'-phosphate
  modified_base 16: mod_base = OTHER; note = 2'-O-methylcytidine-3'-phosphate
  modified_base 17: mod_base = OTHER; note = 2'-O-methyluridine-3'-phosphate
  modified_base 18: mod_base = OTHER; note = 2'-O-methylguanosine-3'-phosphate
  modified_base 19: mod_base = OTHER; note = 2'-O-methylguanosine-3'-phosphate
  modified_base 20: mod_base = OTHER; note = 2'-O-methylguanosine-3'-phosphate
  modified_base 21: mod_base = OTHER; note = 2'-O-methyladenosine-3'-phosphorothioate
  modified_base 22: mod_base = OTHER; note = 2'-O-methylguanosine-3'-phosphorothioate
  modified_base 23: mod_base = OTHER; note = 2'-O-methylcytidine
  misc_feature 1: note = RNA
  misc_feature 3..4: note = RNA
  misc_feature 6: note = RNA
  misc_feature 8..11: note = RNA
  misc_feature 13..23: note = RNA
  misc_feature 2: note = DNA
  misc_feature 5: note = DNA
  misc_feature 7: note = DNA
  misc_feature 12: note = DNA
tcagatctcaagaaactgggagc

SEQ ID NO: 75 - DNA, 23 bp, synthetic construct
  source 1..23: mol_type = other DNA
  modified_base 1: mod_base = OTHER; note = 2'-O-methyluridine-3'-phosphorothioate 5'-(E)-Vinylphosphonate
  modified_base 2: mod_base = OTHER; note = 2'-deoxy-2'-fluoroguanosine-3'-phosphorothioate
  modified_base 3: mod_base = OTHER; note = 2'-O-methylguanosine-3'-phosphate
  modified_base 4: mod_base = OTHER; note = 2'-O-methyladenosine-3'-phosphate
  modified_base 6: mod_base = OTHER; note = 2'-O-methylcytidine-3'-phosphate
  modified_base 7: mod_base = OTHER; note = Thymidine-glycol nucleic acid (GNA), S-Isomer
  modified_base 8: mod_base = OTHER; note = 2'-O-methylguanosine-3'-phosphate
  modified_base 9: mod_base = OTHER; note = 2'-O-methyladenosine-3'-phosphate
  modified_base 10: mod_base = OTHER; note = 2'-O-methylguanosine-3'-phosphate
  modified_base 11: mod_base = OTHER; note = 2'-O-methylcytidine-3'-phosphate
  modified_base 12: mod_base = OTHER; note = 2'-O-methyladenosine-3'-phosphate
  modified_base 13: mod_base = OTHER; note = 2'-O-methylcytidine-3'-phosphate
  modified_base 14: mod_base = OTHER; note = 2'-deoxy-2'-fluorouridine-3'-phosphate
  modified_base 15: mod_base = OTHER; note = 2'-O-methyluridine-3'-phosphate
  modified_base 16: mod_base = OTHER; note = 2'-deoxy-2'-fluoroguanosine-3'-phosphate
  modified_base 17: mod_base = OTHER; note = 2'-O-methyluridine-3'-phosphate
  modified_base 18: mod_base = OTHER; note = 2'-O-methyladenosine-3'-phosphate
  modified_base 19: mod_base = OTHER; note = 2'-O-methylcytidine-3'-phosphate
  modified_base 20: mod_base = OTHER; note = 2'-O-methyladenosine-3'-phosphate
  modified_base 21: mod_base = OTHER; note = 2'-O-methylguanosine-3'-phosphorothioate
  modified_base 22: mod_base = OTHER; note = 2'-O-methylguanosine-3'-phosphorothioate
  modified_base 23: mod_base = OTHER; note = 2'-O-methyladenosine
  misc_feature 1..4: note = RNA
  misc_feature 6..23: note = RNA
  misc_feature 5: note = DNA
tggaactgagcacttgtacagga

SEQ ID NO: 76 - DNA, 23 bp, synthetic construct
  source 1..23: mol_type = other DNA
  modified_base 1: mod_base = OTHER; note = 2'-O-methyluridine-3'-phosphorothioate 5'-(E)-Vinylphosphonate
  modified_base 2: mod_base = OTHER; note = 2'-deoxy-2'-fluorouridine-3'-phosphorothioate
  modified_base 3: mod_base = OTHER; note = 2'-O-methylguanosine-3'-phosphate
  modified_base 4: mod_base = OTHER; note = 2'-O-methylguanosine-3'-phosphate
  modified_base 6: mod_base = OTHER; note = 2'-O-methyladenosine-3'-phosphate
  modified_base 7: mod_base = OTHER; note = cytidine-2'-phosphate
  modified_base 8: mod_base = OTHER; note = 2'-O-methyluridine-3'-phosphate
  modified_base 9: mod_base = OTHER; note = 2'-O-methylguanosine-3'-phosphate
  modified_base 10: mod_base = OTHER; note = 2'-O-methyladenosine-3'-phosphate
  modified_base 11: mod_base = OTHER; note = 2'-O-methylguanosine-3'-phosphate
  modified_base 12: mod_base = OTHER; note = 2'-O-methylcytidine-3'-phosphate
  modified_base 13: mod_base = OTHER; note = 2'-O-methyladenosine-3'-phosphate
  modified_base 14: mod_base = OTHER; note = 2'-deoxy-2'-fluorocytidine-3'-phosphate
  modified_base 15: mod_base = OTHER; note = 2'-O-methyluridine-3'-phosphate
  modified_base 16: mod_base = OTHER; note = 2'-deoxy-2'-fluorouridine-3'-phosphate
  modified_base 17: mod_base = OTHER; note = 2'-O-methylguanosine-3'-phosphate
  modified_base 18: mod_base = OTHER; note = 2'-O-methyluridine-3'-phosphate
  modified_base 19: mod_base = OTHER; note = 2'-O-methyladenosine-3'-phosphate
  modified_base 20: mod_base = OTHER; note = 2'-O-methylcytidine-3'-phosphate
  modified_base 21: mod_base = OTHER; note = 2'-O-methyladenosine-3'-phosphorothioate
  modified_base 22: mod_base = OTHER; note = 2'-O-methylguanosine-3'-phosphorothioate
  modified_base 23: mod_base = OTHER; note = 2'-O-methylguanosine
  misc_feature 1..4: note = RNA
  misc_feature 6..23: note = RNA
  misc_feature 5: note = DNA
ttggaactgagcacttgtacagg

SEQ ID NO: 77 - DNA, 23 bp, synthetic construct
  source 1..23: mol_type = other DNA
  modified_base 1: mod_base = OTHER; note = 2'-O-methyluridine-3'-phosphorothioate 5'-(E)-Vinylphosphonate
  modified_base 2: mod_base = OTHER; note = 2'-deoxy-2'-fluorouridine-3'-phosphorothioate
  modified_base 3: mod_base = OTHER; note = 2'-O-methyluridine-3'-phosphate
  modified_base 4: mod_base = OTHER; note = 2'-O-methylguanosine-3'-phosphate
  modified_base 6: mod_base = OTHER; note = 2'-O-methyladenosine-3'-phosphate
  modified_base 7: mod_base = OTHER; note = Adenosine-glycol nucleic acid (GNA), S-isomer
  modified_base 8: mod_base = OTHER; note = 2'-O-methylcytidine-3'-phosphate
  modified_base 9: mod_base = OTHER; note = 2'-O-methyluridine-3'-phosphate
  modified_base 10: mod_base = OTHER; note = 2'-O-methylguanosine-3'-phosphate
  modified_base 11: mod_base = OTHER; note = 2'-O-methyladenosine-3'-phosphate
  modified_base 12: mod_base = OTHER; note = 2'-O-methylguanosine-3'-phosphate
  modified_base 13: mod_base = OTHER; note = 2'-O-methylcytidine-3'-phosphate
  modified_base 14: mod_base = OTHER; note = 2'-deoxy-2'-fluoroadenosine-3'-phosphate
  modified_base 15: mod_base = OTHER; note = 2'-O-methylcytidine-3'-phosphate
  modified_base 16: mod_base = OTHER; note = 2'-deoxy-2'-fluorouridine-3'-phosphate
  modified_base 17: mod_base = OTHER; note = 2'-O-methyluridine-3'-phosphate
  modified_base 18: mod_base = OTHER; note = 2'-O-methylguanosine-3'-phosphate
  modified_base 19: mod_base = OTHER; note = 2'-O-methyluridine-3'-phosphate
  modified_base 20: mod_base = OTHER; note = 2'-O-methyladenosine-3'-phosphate
  modified_base 21: mod_base = OTHER; note = 2'-O-methylcytidine-3'-phosphorothioate
  modified_base 22: mod_base = OTHER; note = 2'-O-methyladenosine-3'-phosphorothioate
  modified_base 23: mod_base = OTHER; note = 2'-O-methylguanosine
  misc_feature 1..4: note = RNA
  misc_feature 6..23: note = RNA
  misc_feature 5: note = DNA
tttggaactgagcacttgtacag

SEQ ID NO: 78 - DNA, 23 bp, synthetic construct
  source 1..23: mol_type = other DNA
  modified_base 1: mod_base = OTHER; note = 2'-O-methyluridine-3'-phosphorothioate 5'-(E)-Vinylphosphonate
  modified_base 2: mod_base = OTHER; note = 2'-deoxycytidine-3'-phosphorothioate
  modified_base 3: mod_base = OTHER; note = 2'-O-methyladenosine-3'-phosphate
  modified_base 4: mod_base = OTHER; note = 2'-O-methylcytidine-3'-phosphate
  modified_base 6: mod_base = OTHER; note = 2'-O-methyluridine-3'-phosphate
  modified_base 8: mod_base = OTHER; note = 2'-O-methylguanosine-3'-phosphate
  modified_base 9: mod_base = OTHER; note = 2'-O-methylguanosine-3'-phosphate
  modified_base 10: mod_base = OTHER; note = 2'-O-methyladenosine-3'-phosphate
  modified_base 11: mod_base = OTHER; note = 2'-O-methyladenosine-3'-phosphate
  modified_base 13: mod_base = OTHER; note = 2'-O-methyluridine-3'-phosphate
  modified_base 14: mod_base = OTHER; note = 2'-deoxy-2'-fluoroguanosine-3'-phosphate
  modified_base 15: mod_base = OTHER; note = 2'-O-methyladenosine-3'-phosphate
  modified_base 16: mod_base = OTHER; note = 2'-O-methylguanosine-3'-phosphate
  modified_base 17: mod_base = OTHER; note = 2'-O-methylcytidine-3'-phosphate
  modified_base 18: mod_base = OTHER; note = 2'-O-methyladenosine-3'-phosphate
  modified_base 19: mod_base = OTHER; note = 2'-O-methylcytidine-3'-phosphate
  modified_base 20: mod_base = OTHER; note = 2'-O-methyluridine-3'-phosphate
  modified_base 21: mod_base = OTHER; note = 2'-O-methyluridine-3'-phosphorothioate
  modified_base 22: mod_base = OTHER; note = 2'-O-methylguanosine-3'-phosphorothioate
  modified_base 23: mod_base = OTHER; note = 2'-O-methyluridine
  misc_feature 1: note = RNA
  misc_feature 3..4: note = RNA
  misc_feature 6: note = RNA
  misc_feature 8..11: note = RNA
  misc_feature 13..23: note = RNA
  misc_feature 2: note = DNA
  misc_feature 5: note = DNA
  misc_feature 7: note = DNA
  misc_feature 12: note = DNA
tcacattggaactgagcacttgt

SEQ ID NO: 79 - DNA, 23 bp, synthetic construct
  source 1..23: mol_type = other DNA
  modified_base 1: mod_base = OTHER; note = 2'-O-methyluridine-3'-phosphorothioate 5'-(E)-Vinylphosphonate
  modified_base 2: mod_base = OTHER; note = 2'-deoxyguanosine-3'-phosphorothioate
  modified_base 3: mod_base = OTHER; note = 2'-O-methylcytidine-3'-phosphate
  modified_base 4: mod_base = OTHER; note = 2'-O-methyladenosine-3'-phosphate
  modified_base 6: mod_base = OTHER; note = 2'-O-methyladenosine-3'-phosphate
  modified_base 8: mod_base = OTHER; note = 2'-O-methyluridine-3'-phosphate
  modified_base 9: mod_base = OTHER; note = 2'-O-methylguanosine-3'-phosphate
  modified_base 10: mod_base = OTHER; note = 2'-O-methylguanosine-3'-phosphate
  modified_base 11: mod_base = OTHER; note = 2'-O-methyladenosine-3'-phosphate
  modified_base 13: mod_base = OTHER; note = 2'-O-methylcytidine-3'-phosphate
  modified_base 14: mod_base = OTHER; note = 2'-deoxy-2'-fluorouridine-3'-phosphate
  modified_base 15: mod_base = OTHER; note = 2'-O-methylguanosine-3'-phosphate
  modified_base 16: mod_base = OTHER; note = 2'-O-methyladenosine-3'-phosphate
  modified_base 17: mod_base = OTHER; note = 2'-O-methylguanosine-3'-phosphate
  modified_base 18: mod_base = OTHER; note = 2'-O-methylcytidine-3'-phosphate
  modified_base 19: mod_base = OTHER; note = 2'-O-methyladenosine-3'-phosphate
  modified_base 20: mod_base = OTHER; note = 2'-O-methylcytidine-3'-phosphate
  modified_base 21: mod_base = OTHER; note = 2'-O-methyluridine-3'-phosphorothioate
  modified_base 22: mod_base = OTHER; note = 2'-O-methyluridine-3'-phosphorothioate
  modified_base 23: mod_base = OTHER; note = 2'-O-methylguanosine
  misc_feature 1: note = RNA
  misc_feature 3..4: note = RNA
  misc_feature 6: note = RNA
  misc_feature 8..11: note = RNA
  misc_feature 13..23: note = RNA
  misc_feature 2: note = DNA
  misc_feature 5: note = DNA
  misc_feature 7: note = DNA
  misc_feature 12: note = DNA
tgcacattggaactgagcacttg

SEQ ID NO: 80 - DNA, 23 bp, synthetic construct
  source 1..23: mol_type = other DNA
  modified_base 1: mod_base = OTHER; note = 2'-O-methyluridine-3'-phosphorothioate 5'-(E)-Vinylphosphonate
  modified_base 2: mod_base = OTHER; note = 2'-deoxyadenosine-3'-phosphorothioate
  modified_base 3: mod_base = OTHER; note = 2'-O-methylguanosine-3'-phosphate
  modified_base 4: mod_base = OTHER; note = 2'-O-methyladenosine-3'-phosphate
  modified_base 6: mod_base = OTHER; note = 2'-O-methyladenosine-3'-phosphate
  modified_base 8: mod_base = OTHER; note = 2'-O-methylguanosine-3'-phosphate
  modified_base 9: mod_base = OTHER; note = 2'-O-methyluridine-3'-phosphate
  modified_base 10: mod_base = OTHER; note = 2'-O-methylcytidine-3'-phosphate
  modified_base 11: mod_base = OTHER; note = 2'-O-methyladenosine-3'-phosphate
  modified_base 13: mod_base = OTHER; note = 2'-O-methylguanosine-3'-phosphate
  modified_base 14: mod_base = OTHER; note = 2'-deoxy-2'-fluoroadenosine-3'-phosphate
  modified_base 15: mod_base = OTHER; note = 2'-O-methylcytidine-3'-phosphate
  modified_base 16: mod_base = OTHER; note = 2'-O-methyluridine-3'-phosphate
  modified_base 17: mod_base = OTHER; note = 2'-O-methylguanosine-3'-phosphate
  modified_base 18: mod_base = OTHER; note = 2'-O-methylguanosine-3'-phosphate
  modified_base 19: mod_base = OTHER; note = 2'-O-methylguanosine-3'-phosphate
  modified_base 20: mod_base = OTHER; note = 2'-O-methylcytidine-3'-phosphate
  modified_base 21: mod_base = OTHER; note = 2'-O-methyladenosine-3'-phosphorothioate
  modified_base 22: mod_base = OTHER; note = 2'-O-methylcytidine-3'-phosphorothioate
  modified_base 23: mod_base = OTHER; note = 2'-O-methyladenosine
  misc_feature 1: note = RNA
  misc_feature 3..4: note = RNA
  misc_feature 6: note = RNA
  misc_feature 8..11: note = RNA
  misc_feature 13..23: note = RNA
  misc_feature 2: note = DNA
  misc_feature 5: note = DNA
  misc_feature 7: note = DNA
  misc_feature 12: note = DNA
tagaaatgtcatgactgggcaca

SEQ ID NO: 81 - DNA, 23 bp, synthetic construct
  source 1..23: mol_type = other DNA
  modified_base 1: mod_base = OTHER; note = 2'-O-methyluridine-3'-phosphorothioate 5'-(E)-Vinylphosphonate
  modified_base 2: mod_base = OTHER; note = 2'-deoxythymidine-3'-phosphorothioate
  modified_base 3: mod_base = OTHER; note = 2'-O-methyluridine-3'-phosphate
  modified_base 4: mod_base = OTHER; note = 2'-O-methylguanosine-3'-phosphate
  modified_base 6: mod_base = OTHER; note = 2'-O-methylguanosine-3'-phosphate
  modified_base 8: mod_base = OTHER; note = 2'-O-methyladenosine-3'-phosphate
  modified_base 9: mod_base = OTHER; note = 2'-O-methyladenosine-3'-phosphate
  modified_base 10: mod_base = OTHER; note = 2'-O-methyluridine-3'-phosphate
  modified_base 11: mod_base = OTHER; note = 2'-O-methylguanosine-3'-phosphate
  modified_base 13: mod_base = OTHER; note = 2'-O-methylcytidine-3'-phosphate
  modified_base 14: mod_base = OTHER; note = 2'-deoxy-2'-fluoroadenosine-3'-phosphate
  modified_base 15: mod_base = OTHER; note = 2'-O-methyluridine-3'-phosphate
  modified_base 16: mod_base = OTHER; note = 2'-O-methylguanosine-3'-phosphate
  modified_base 17: mod_base = OTHER; note = 2'-O-methyladenosine-3'-phosphate
  modified_base 18: mod_base = OTHER; note = 2'-O-methylcytidine-3'-phosphate
  modified_base 19: mod_base = OTHER; note = 2'-O-methyluridine-3'-phosphate
  modified_base 20: mod_base = OTHER; note = 2'-O-methylguanosine-3'-phosphate
  modified_base 21: mod_base = OTHER; note = 2'-O-methylguanosine-3'-phosphorothioate
  modified_base 22: mod_base = OTHER; note = 2'-O-methylguanosine-3'-phosphorothioate
  modified_base 23: mod_base = OTHER; note = 2'-O-methylcytidine
  misc_feature 1: note = RNA
  misc_feature 3..4: note = RNA
  misc_feature 6: note = RNA
  misc_feature 8..11: note = RNA
  misc_feature 13..23: note = RNA
  misc_feature 2: note = DNA
  misc_feature 5: note = DNA
  misc_feature 7: note = DNA
  misc_feature 12: note = DNA
tttgagaaatgtcatgactgggc

SEQ ID NO: 82 - DNA, 23 bp, synthetic construct
  source 1..23: mol_type = other DNA
  modified_base 1: mod_base = OTHER; note = 2'-O-methyluridine-3'-phosphorothioate 5'-(E)-Vinylphosphonate
  modified_base 2: mod_base = OTHER; note = 2'-deoxyadenosine-3'-phosphorothioate
  modified_base 3: mod_base = OTHER; note = 2'-O-methylcytidine-3'-phosphate
  modified_base 4: mod_base = OTHER; note = 2'-O-methyluridine-3'-phosphate
  modified_base 6: mod_base = OTHER; note = 2'-O-methyluridine-3'-phosphate
  modified_base 8: mod_base = OTHER; note = 2'-O-methyladenosine-3'-phosphate
  modified_base 9: mod_base = OTHER; note = 2'-O-methylguanosine-3'-phosphate
  modified_base 10: mod_base = OTHER; note = 2'-O-methyladenosine-3'-phosphate
  modified_base 11: mod_base = OTHER; note = 2'-O-methyladenosine-3'-phosphate
  modified_base 13: mod_base = OTHER; note = 2'-O-methyluridine-3'-phosphate
  modified_base 14: mod_base = OTHER; note = 2'-deoxy-2'-fluoroguanosine-3'-phosphate
  modified_base 15: mod_base = OTHER; note = 2'-O-methyluridine-3'-phosphate
  modified_base 16: mod_base = OTHER; note = 2'-O-methylcytidine-3'-phosphate
  modified_base 17: mod_base = OTHER; note = 2'-O-methyladenosine-3'-phosphate
  modified_base 18: mod_base = OTHER; note = 2'-O-methyluridine-3'-phosphate
  modified_base 19: mod_base = OTHER; note = 2'-O-methylguanosine-3'-phosphate
  modified_base 20: mod_base = OTHER; note = 2'-O-methyladenosine-3'-phosphate
  modified_base 21: mod_base = OTHER; note = 2'-O-methylcytidine-3'-phosphorothioate
  modified_base 22: mod_base = OTHER; note = 2'-O-methyluridine-3'-phosphorothioate
  modified_base 23: mod_base = OTHER; note = 2'-O-methylguanosine
  misc_feature 1: note = RNA
  misc_feature 3..4: note = RNA
  misc_feature 6: note = RNA
  misc_feature 8..11: note = RNA
  misc_feature 13..23: note = RNA
  misc_feature 2: note = DNA
  misc_feature 5: note = DNA
  misc_feature 7: note = DNA
  misc_feature 12: note = DNA
tactttgagaaatgtcatgactg

SEQ ID NO: 83 - DNA, 23 bp, synthetic construct
  source 1..23: mol_type = other DNA
  modified_base 1: mod_base = OTHER; note = 2'-O-methyluridine-3'-phosphorothioate 5'-(E)-Vinylphosphonate
  modified_base 2: mod_base = OTHER; note = 2'-deoxyadenosine-3'-phosphorothioate
  modified_base 3: mod_base = OTHER; note = 2'-O-methyladenosine-3'-phosphate
  modified_base 4: mod_base = OTHER; note = 2'-O-methyladenosine-3'-phosphate
  modified_base 6: mod_base = OTHER; note = 2'-O-methyluridine-3'-phosphate
  modified_base 8: mod_base = OTHER; note = 2'-O-methyluridine-3'-phosphate
  modified_base 9: mod_base = OTHER; note = 2'-O-methylguanosine-3'-phosphate
  modified_base 10: mod_base = OTHER; note = 2'-O-methyladenosine-3'-phosphate
  modified_base 11: mod_base = OTHER; note = 2'-O-methylguanosine-3'-phosphate
  modified_base 13: mod_base = OTHER; note = 2'-O-methyladenosine-3'-phosphate
  modified_base 14: mod_base = OTHER; note = 2'-deoxy-2'-fluoroadenosine-3'-phosphate
  modified_base 15: mod_base = OTHER; note = 2'-O-methyluridine-3'-phosphate
  modified_base 16: mod_base = OTHER; note = 2'-O-methylguanosine-3'-phosphate
  modified_base 17: mod_base = OTHER; note = 2'-O-methyluridine-3'-phosphate
  modified_base 18: mod_base = OTHER; note = 2'-O-methylcytidine-3'-phosphate
  modified_base 19: mod_base = OTHER; note = 2'-O-methyladenosine-3'-phosphate
  modified_base 20: mod_base = OTHER; note = 2'-O-methyluridine-3'-phosphate
  modified_base 21: mod_base = OTHER; note = 2'-O-methylguanosine-3'-phosphorothioate
  modified_base 22: mod_base = OTHER; note = 2'-O-methyladenosine-3'-phosphorothioate
  modified_base 23: mod_base = OTHER; note = 2'-O-methylcytidine
  misc_feature 1: note = RNA
  misc_feature 3..4: note = RNA
  misc_feature 6: note = RNA
  misc_feature 8..11: note = RNA
  misc_feature 13..23: note = RNA
  misc_feature 2: note = DNA
  misc_feature 5: note = DNA
  misc_feature 7: note = DNA
  misc_feature 12: note = DNA
taaactttgagaaatgtcatgac

SEQ ID NO: 84 - DNA, 23 bp, synthetic construct
  source 1..23: mol_type = other DNA
  modified_base 1: mod_base = OTHER; note = 2'-O-methyluridine-3'-phosphorothioate 5'-(E)-Vinylphosphonate
  modified_base 2: mod_base = OTHER; note = 2'-deoxycytidine-3'-phosphorothioate
  modified_base 3: mod_base = OTHER; note = 2'-O-methyladenosine-3'-phosphate
  modified_base 4: mod_base = OTHER; note = 2'-O-methyladenosine-3'-phosphate
  modified_base 6: mod_base = OTHER; note = 2'-O-methylcytidine-3'-phosphate
  modified_base 8: mod_base = OTHER; note = 2'-O-methylcytidine-3'-phosphate
  modified_base 9: mod_base = OTHER; note = 2'-O-methyluridine-3'-phosphate
  modified_base 10: mod_base = OTHER; note = 2'-O-methylguanosine-3'-phosphate
  modified_base 11: mod_base = OTHER; note = 2'-O-methylcytidine-3'-phosphate
  modified_base 13: mod_base = OTHER; note = 2'-O-methylguanosine-3'-phosphate
  modified_base 14: mod_base = OTHER; note = 2'-deoxy-2'-fluoroadenosine-3'-phosphate
  modified_base 15: mod_base = OTHER; note = 2'-O-methyluridine-3'-phosphate
  modified_base 16: mod_base = OTHER; note = 2'-O-methylguanosine-3'-phosphate
  modified_base 17: mod_base = OTHER; note = 2'-O-methylguanosine-3'-phosphate
  modified_base 18: mod_base = OTHER; note = 2'-O-methyladenosine-3'-phosphate
  modified_base 19: mod_base = OTHER; note = 2'-O-methyladenosine-3'-phosphate
  modified_base 20: mod_base = OTHER; note = 2'-O-methylguanosine-3'-phosphate
  modified_base 21: mod_base = OTHER; note = 2'-O-methyladenosine-3'-phosphorothioate
  modified_base 22: mod_base = OTHER; note = 2'-O-methylcytidine-3'-phosphorothioate
  modified_base 23: mod_base = OTHER; note = 2'-O-methyluridine
  misc_feature 1: note = RNA
  misc_feature 3..4: note = RNA
  misc_feature 6: note = RNA
  misc_feature 8..11: note = RNA
  misc_feature 13..23: note = RNA
  misc_feature 2: note = DNA
  misc_feature 5: note = DNA
  misc_feature 7: note = DNA
  misc_feature 12: note = DNA
tcaatcactgctgatggaagact

SEQ ID NO: 85 - DNA, 23 bp, synthetic construct
  source 1..23: mol_type = other DNA
  modified_base 1: mod_base = OTHER; note = 2'-O-methyluridine-3'-phosphorothioate 5'-(E)-Vinylphosphonate
  modified_base 2: mod_base = OTHER; note = 2'-deoxy-2'-fluorouridine-3'-phosphorothioate
  modified_base 3: mod_base = OTHER; note = 2'-O-methyluridine-3'-phosphate
  modified_base 4: mod_base = OTHER; note = 2'-O-methylcytidine-3'-phosphate
  modified_base 6: mod_base = OTHER; note = 2'-O-methyladenosine-3'-phosphate
  modified_base 7: mod_base = OTHER; note = Thymidine-glycol nucleic acid (GNA), S-Isomer
  modified_base 8: mod_base = OTHER; note = 2'-O-methylcytidine-3'-phosphate
  modified_base 9: mod_base = OTHER; note = 2'-O-methyladenosine-3'-phosphate
  modified_base 10: mod_base = OTHER; note = 2'-O-methylcytidine-3'-phosphate
  modified_base 11: mod_base = OTHER; note = 2'-O-methyluridine-3'-phosphate
  modified_base 12: mod_base = OTHER; note = 2'-O-methylguanosine-3'-phosphate
  modified_base 13: mod_base = OTHER; note = 2'-O-methylcytidine-3'-phosphate
  modified_base 14: mod_base = OTHER; note = 2'-deoxy-2'-fluorouridine-3'-phosphate
  modified_base 15: mod_base = OTHER; note = 2'-O-methylguanosine-3'-phosphate
  modified_base 16: mod_base = OTHER; note = 2'-deoxy-2'-fluoroadenosine-3'-phosphate
  modified_base 17: mod_base = OTHER; note = 2'-O-methyluridine-3'-phosphate
  modified_base 18: mod_base = OTHER; note = 2'-O-methylguanosine-3'-phosphate
  modified_base 19: mod_base = OTHER; note = 2'-O-methylguanosine-3'-phosphate
  modified_base 20: mod_base = OTHER; note = 2'-O-methyladenosine-3'-phosphate
  modified_base 21: mod_base = OTHER; note = 2'-O-methyladenosine-3'-phosphorothioate
  modified_base 22: mod_base = OTHER; note = 2'-O-methylguanosine-3'-phosphorothioate
  modified_base 23: mod_base = OTHER; note = 2'-O-methyladenosine
  misc_feature 1..4: note = RNA
  misc_feature 6..23: note = RNA
  misc_feature 5: note = DNA
tttcaatcactgctgatggaaga

SEQ ID NO: 86 - DNA, 23 bp, synthetic construct
  source 1..23: mol_type = other DNA
  modified_base 1: mod_base = OTHER; note = 2'-O-methyluridine-3'-phosphorothioate 5'-(E)-Vinylphosphonate
  modified_base 2: mod_base = OTHER; note = 2'-deoxyadenosine-3'-phosphorothioate
  modified_base 3: mod_base = OTHER; note = 2'-O-methylcytidine-3'-phosphate
  modified_base 4: mod_base = OTHER; note = 2'-O-methyluridine-3'-phosphate
  modified_base 6: mod_base = OTHER; note = 2'-O-methylcytidine-3'-phosphate
  modified_base 8: mod_base = OTHER; note = 2'-O-methyladenosine-3'-phosphate
  modified_base 9: mod_base = OTHER; note = 2'-O-methyluridine-3'-phosphate
  modified_base 10: mod_base = OTHER; note = 2'-O-methylcytidine-3'-phosphate
  modified_base 11: mod_base = OTHER; note = 2'-O-methyladenosine-3'-phosphate
  modified_base 13: mod_base = OTHER; note = 2'-O-methyluridine-3'-phosphate
  modified_base 14: mod_base = OTHER; note = 2'-deoxy-2'-fluoroguanosine-3'-phosphate
  modified_base 15: mod_base = OTHER; note = 2'-O-methylcytidine-3'-phosphate
  modified_base 16: mod_base = OTHER; note = 2'-O-methyluridine-3'-phosphate
  modified_base 17: mod_base = OTHER; note = 2'-O-methylguanosine-3'-phosphate
  modified_base 18: mod_base = OTHER; note = 2'-O-methyladenosine-3'-phosphate
  modified_base 19: mod_base = OTHER; note = 2'-O-methyluridine-3'-phosphate
  modified_base 20: mod_base = OTHER; note = 2'-O-methylguanosine-3'-phosphate
  modified_base 21: mod_base = OTHER; note = 2'-O-methylguanosine-3'-phosphorothioate
  modified_base 22: mod_base = OTHER; note = 2'-O-methyladenosine-3'-phosphorothioate
  modified_base 23: mod_base = OTHER; note = 2'-O-methyladenosine
  misc_feature 1: note = RNA
  misc_feature 3..4: note = RNA
  misc_feature 6: note = RNA
  misc_feature 8..11: note = RNA
  misc_feature 13..23: note = RNA
  misc_feature 2: note = DNA
  misc_feature 5: note = DNA
  misc_feature 7: note = DNA
  misc_feature 12: note = DNA
tacttcaatcactgctgatggaa

SEQ ID NO: 87 - DNA, 23 bp, synthetic construct
  source 1..23: mol_type = other DNA
  modified_base 1: mod_base = OTHER; note = 2'-O-methyluridine-3'-phosphorothioate 5'-(E)-Vinylphosphonate
  modified_base 2: mod_base = OTHER; note = 2'-deoxy-2'-fluoroadenosine-3'-phosphorothioate
  modified_base 3: mod_base = OTHER; note = 2'-O-methylcytidine-3'-phosphate
  modified_base 4: mod_base = OTHER; note = 2'-O-methyluridine-3'-phosphate
  modified_base 6: mod_base = OTHER; note = 2'-O-methylcytidine-3'-phosphate
  modified_base 7: mod_base = OTHER; note = Adenosine-glycol nucleic acid (GNA), S-isomer
  modified_base 8: mod_base = OTHER; note = 2'-O-methyladenosine-3'-phosphate
  modified_base 9: mod_base = OTHER; note = 2'-O-methyluridine-3'-phosphate
  modified_base 10: mod_base = OTHER; note = 2'-O-methylcytidine-3'-phosphate
  modified_base 11: mod_base = OTHER; note = 2'-O-methyladenosine-3'-phosphate
  modified_base 12: mod_base = OTHER; note = 2'-O-methylcytidine-3'-phosphate
  modified_base 13: mod_base = OTHER; note = 2'-O-methyluridine-3'-phosphate
  modified_base 14: mod_base = OTHER; note = 2'-deoxy-2'-fluoroguanosine-3'-phosphate
  modified_base 15: mod_base = OTHER; note = 2'-O-methylcytidine-3'-phosphate
  modified_base 16: mod_base = OTHER; note = 2'-deoxy-2'-fluorouridine-3'-phosphate
  modified_base 17: mod_base = OTHER; note = 2'-O-methylguanosine-3'-phosphate
  modified_base 18: mod_base = OTHER; note = 2'-O-methyladenosine-3'-phosphate
  modified_base 19: mod_base = OTHER; note = 2'-O-methyluridine-3'-phosphate
  modified_base 20: mod_base = OTHER; note = 2'-O-methylguanosine-3'-phosphate
  modified_base 21: mod_base = OTHER; note = 2'-O-methylguanosine-3'-phosphorothioate
  modified_base 22: mod_base = OTHER; note = 2'-O-methyladenosine-3'-phosphorothioate
  modified_base 23: mod_base = OTHER; note = 2'-O-methyladenosine
  misc_feature 1..4: note = RNA
  misc_feature 6..23: note = RNA
  misc_feature 5: note = DNA
tacttcaatcactgctgatggaa

SEQ ID NO: 88 - DNA, 23 bp, synthetic construct
  source 1..23: mol_type = other DNA
  modified_base 1: mod_base = OTHER; note = 2'-O-methyluridine-3'-phosphorothioate 5'-(E)-Vinylphosphonate
  modified_base 2: mod_base = OTHER; note = 2'-deoxyadenosine-3'-phosphorothioate
  modified_base 3: mod_base = OTHER; note = 2'-O-methyluridine-3'-phosphate
  modified_base 4: mod_base = OTHER; note = 2'-O-methyladenosine-3'-phosphate
  modified_base 6: mod_base = OTHER; note = 2'-O-methyluridine-3'-phosphate
  modified_base 8: mod_base = OTHER; note = 2'-O-methylcytidine-3'-phosphate
  modified_base 9: mod_base = OTHER; note = 2'-O-methyladenosine-3'-phosphate
  modified_base 10: mod_base = OTHER; note = 2'-O-methyladenosine-3'-phosphate
  modified_base 11: mod_base = OTHER; note = 2'-O-methyluridine-3'-phosphate
  modified_base 13: mod_base = OTHER; note = 2'-O-methyladenosine-3'-phosphate
  modified_base 14: mod_base = OTHER; note = 2'-deoxy-2'-fluorocytidine-3'-phosphate
  modified_base 15: mod_base = OTHER; note = 2'-O-methyluridine-3'-phosphate
  modified_base 16: mod_base = OTHER; note = 2'-O-methylguanosine-3'-phosphate
  modified_base 17: mod_base = OTHER; note = 2'-O-methylcytidine-3'-phosphate
  modified_base 18: mod_base = OTHER; note = 2'-O-methyluridine-3'-phosphate
  modified_base 19: mod_base = OTHER; note = 2'-O-methylguanosine-3'-phosphate
  modified_base 20: mod_base = OTHER; note = 2'-O-methyladenosine-3'-phosphate
  modified_base 21: mod_base = OTHER; note = 2'-O-methyluridine-3'-phosphorothioate
  modified_base 22: mod_base = OTHER; note = 2'-O-methylguanosine-3'-phosphorothioate
  modified_base 23: mod_base = OTHER; note = 2'-O-methylguanosine
  misc_feature 1: note = RNA
  misc_feature 3..4: note = RNA
  misc_feature 6: note = RNA
  misc_feature 8..11: note = RNA
  misc_feature 13..23: note = RNA
  misc_feature 2: note = DNA
  misc_feature 5: note = DNA
  misc_feature 7: note = DNA
  misc_feature 12: note = DNA
tatacttcaatcactgctgatgg

SEQ ID NO: 89 - DNA, 23 bp, synthetic construct
  source 1..23: mol_type = other DNA
  modified_base 1: mod_base = OTHER; note = 2'-O-methyluridine-3'-phosphorothioate 5'-(E)-Vinylphosphonate
  modified_base 2: mod_base = OTHER; note = 2'-deoxy-2'-fluoroadenosine-3'-phosphorothioate
  modified_base 3: mod_base = OTHER; note = 2'-O-methyluridine-3'-phosphate
  modified_base 4: mod_base = OTHER; note = 2'-O-methyladenosine-3'-phosphate
  modified_base 6: mod_base = OTHER; note = 2'-O-methyluridine-3'-phosphate
  modified_base 7: mod_base = OTHER; note = Thymidine-glycol nucleic acid (GNA), S-Isomer
  modified_base 8: mod_base = OTHER; note = 2'-O-methylcytidine-3'-phosphate
  modified_base 9: mod_base = OTHER; note = 2'-O-methyladenosine-3'-phosphate
  modified_base 10: mod_base = OTHER; note = 2'-O-methyladenosine-3'-phosphate
  modified_base 11: mod_base = OTHER; note = 2'-O-methyluridine-3'-phosphate
  modified_base 12: mod_base = OTHER; note = 2'-O-methylcytidine-3'-phosphate
  modified_base 13: mod_base = OTHER; note = 2'-O-methyladenosine-3'-phosphate
  modified_base 14: mod_base = OTHER; note = 2'-deoxy-2'-fluorocytidine-3'-phosphate
  modified_base 15: mod_base = OTHER; note = 2'-O-methyluridine-3'-phosphate
  modified_base 16: mod_base = OTHER; note = 2'-deoxy-2'-fluoroguanosine-3'-phosphate
  modified_base 17: mod_base = OTHER; note = 2'-O-methylcytidine-3'-phosphate
  modified_base 18: mod_base = OTHER; note = 2'-O-methyluridine-3'-phosphate
  modified_base 19: mod_base = OTHER; note = 2'-O-methylguanosine-3'-phosphate
  modified_base 20: mod_base = OTHER; note = 2'-O-methyladenosine-3'-phosphate
  modified_base 21: mod_base = OTHER; note = 2'-O-methyluridine-3'-phosphorothioate
  modified_base 22: mod_base = OTHER; note = 2'-O-methylguanosine-3'-phosphorothioate
  modified_base 23: mod_base = OTHER; note = 2'-O-methylguanosine
  misc_feature 1..4: note = RNA
  misc_feature 6..23: note = RNA
  misc_feature 5: note = DNA
tatacttcaatcactgctgatgg

SEQ ID NO: 90 - DNA, 23 bp, synthetic construct
  source 1..23: mol_type = other DNA
  modified_base 1: mod_base = OTHER; note = 2'-O-methyluridine-3'-phosphorothioate 5'-(E)-Vinylphosphonate
  modified_base 2: mod_base = OTHER; note = 2'-deoxycytidine-3'-phosphorothioate
  modified_base 3: mod_base = OTHER; note = 2'-O-methyladenosine-3'-phosphate
  modified_base 4: mod_base = OTHER; note = 2'-O-methylguanosine-3'-phosphate
  modified_base 6: mod_base = OTHER; note = 2'-O-methyluridine-3'-phosphate
  modified_base 8: mod_base = OTHER; note = 2'-O-methylcytidine-3'-phosphate
  modified_base 9: mod_base = OTHER; note = 2'-O-methyluridine-3'-phosphate
  modified_base 10: mod_base = OTHER; note = 2'-O-methyluridine-3'-phosphate
  modified_base 11: mod_base = OTHER; note = 2'-O-methylcytidine-3'-phosphate
  modified_base 13: mod_base = OTHER; note = 2'-O-methyladenosine-3'-phosphate
  modified_base 14: mod_base = OTHER; note = 2'-deoxy-2'-fluorouridine-3'-phosphate
  modified_base 15: mod_base = OTHER; note = 2'-O-methylcytidine-3'-phosphate
  modified_base 16: mod_base = OTHER; note = 2'-O-methyladenosine-3'-phosphate
  modified_base 17: mod_base = OTHER; note = 2'-O-methylcytidine-3'-phosphate
  modified_base 18: mod_base = OTHER; note = 2'-O-methyluridine-3'-phosphate
  modified_base 19: mod_base = OTHER; note = 2'-O-methylguanosine-3'-phosphate
  modified_base 20: mod_base = OTHER; note = 2'-O-methylcytidine-3'-phosphate
  modified_base 21: mod_base = OTHER; note = 2'-O-methyluridine-3'-phosphorothioate
  modified_base 22: mod_base = OTHER; note = 2'-O-methylguanosine-3'-phosphorothioate
  modified_base 23: mod_base = OTHER; note = 2'-O-methyladenosine
  misc_feature 1: note = RNA
  misc_feature 3..4: note = RNA
  misc_feature 6: note = RNA
  misc_feature 8..11: note = RNA
  misc_feature 13..23: note = RNA
  misc_feature 2: note = DNA
  misc_feature 5: note = DNA
  misc_feature 7: note = DNA
  misc_feature 12: note = DNA
tcagatacttcaatcactgctga

SEQ ID NO: 91 - DNA, 23 bp, synthetic construct
  source 1..23: mol_type = other DNA
  modified_base 1: mod_base = OTHER; note = 2'-O-methyluridine-3'-phosphorothioate 5'-(E)-Vinylphosphonate
  modified_base 2: mod_base = OTHER; note = 2'-deoxyadenosine-3'-phosphorothioate
  modified_base 3: mod_base = OTHER; note = 2'-O-methylcytidine-3'-phosphate
  modified_base 4: mod_base = OTHER; note = 2'-O-methyladenosine-3'-phosphate
  modified_base 6: mod_base = OTHER; note = 2'-O-methyladenosine-3'-phosphate
  modified_base 8: mod_base = OTHER; note = 2'-O-methyladenosine-3'-phosphate
  modified_base 9: mod_base = OTHER; note = 2'-O-methylcytidine-3'-phosphate
  modified_base 10: mod_base = OTHER; note = 2'-O-methyluridine-3'-phosphate
  modified_base 11: mod_base = OTHER; note = 2'-O-methyluridine-3'-phosphate
  modified_base 13: mod_base = OTHER; note = 2'-O-methyladenosine-3'-phosphate
  modified_base 14: mod_base = OTHER; note = 2'-deoxy-2'-fluoroadenosine-3'-phosphate
  modified_base 15: mod_base = OTHER; note = 2'-O-methyluridine-3'-phosphate
  modified_base 16: mod_base = OTHER; note = 2'-O-methylcytidine-3'-phosphate
  modified_base 17: mod_base = OTHER; note = 2'-O-methyladenosine-3'-phosphate
  modified_base 18: mod_base = OTHER; note = 2'-O-methylcytidine-3'-phosphate
  modified_base 19: mod_base = OTHER; note = 2'-O-methyluridine-3'-phosphate
  modified_base 20: mod_base = OTHER; note = 2'-O-methylguanosine-3'-phosphate
  modified_base 21: mod_base = OTHER; note = 2'-O-methylcytidine-3'-phosphorothioate
  modified_base 22: mod_base = OTHER; note = 2'-O-methyluridine-3'-phosphorothioate
  modified_base 23: mod_base = OTHER; note = 2'-O-methylguanosine
  misc_feature 1: note = RNA
  misc_feature 3..4: note = RNA
  misc_feature 6: note = RNA
  misc_feature 8..11: note = RNA
  misc_feature 13..23: note = RNA
  misc_feature 2: note = DNA
  misc_feature 5: note = DNA
  misc_feature 7: note = DNA
  misc_feature 12: note = DNA
tacagatacttcaatcactgctg

SEQ ID NO: 92 - DNA, 23 bp, synthetic construct
  source 1..23: mol_type = other DNA
  modified_base 1: mod_base = OTHER; note = 2'-O-methyluridine-3'-phosphorothioate 5'-(E)-Vinylphosphonate
  modified_base 2: mod_base = OTHER; note = 2'-deoxy-2'-fluoroadenosine-3'-phosphorothioate
  modified_base 3: mod_base = OTHER; note = 2'-O-methylcytidine-3'-phosphate
  modified_base 4: mod_base = OTHER; note = 2'-O-methyladenosine-3'-phosphate
  modified_base 6: mod_base = OTHER; note = 2'-O-methyladenosine-3'-phosphate
  modified_base 7: mod_base = OTHER; note = Thymidine-glycol nucleic acid (GNA), S-Isomer
  modified_base 8: mod_base = OTHER; note = 2'-O-methyladenosine-3'-phosphate
  modified_base 9: mod_base = OTHER; note = 2'-O-methylcytidine-3'-phosphate
  modified_base 10: mod_base = OTHER; note = 2'-O-methyluridine-3'-phosphate
  modified_base 11: mod_base = OTHER; note = 2'-O-methyluridine-3'-phosphate
  modified_base 12: mod_base = OTHER; note = 2'-O-methylcytidine-3'-phosphate
  modified_base 13: mod_base = OTHER; note = 2'-O-methyladenosine-3'-phosphate
  modified_base 14: mod_base = OTHER; note = 2'-deoxy-2'-fluoroadenosine-3'-phosphate
  modified_base 15: mod_base = OTHER; note = 2'-O-methyluridine-3'-phosphate
  modified_base 16: mod_base = OTHER; note = 2'-deoxy-2'-fluorocytidine-3'-phosphate
  modified_base 17: mod_base = OTHER; note = 2'-O-methyladenosine-3'-phosphate
  modified_base 18: mod_base = OTHER; note = 2'-O-methylcytidine-3'-phosphate
  modified_base 19: mod_base = OTHER; note = 2'-O-methyluridine-3'-phosphate
  modified_base 20: mod_base = OTHER; note = 2'-O-methylguanosine-3'-phosphate
  modified_base 21: mod_base = OTHER; note = 2'-O-methylcytidine-3'-phosphorothioate
  modified_base 22: mod_base = OTHER; note = 2'-O-methyluridine-3'-phosphorothioate
  modified_base 23: mod_base = OTHER; note = 2'-O-methylguanosine
  misc_feature 1..4: note = RNA
  misc_feature 6..23: note = RNA
  misc_feature 5: note = DNA
tacagatacttcaatcactgctg

SEQ ID NO: 93 - DNA, 23 bp, synthetic construct
  source 1..23: mol_type = other DNA
  modified_base 1: mod_base = OTHER; note = 2'-O-methyluridine-3'-phosphorothioate 5'-(E)-Vinylphosphonate
  modified_base 2: mod_base = OTHER; note = 2'-deoxycytidine-3'-phosphorothioate
  modified_base 3: mod_base = OTHER; note = 2'-O-methyladenosine-3'-phosphate
  modified_base 4: mod_base = OTHER; note = 2'-O-methyluridine-3'-phosphate
  modified_base 6: mod_base = OTHER; note = 2'-O-methyluridine-3'-phosphate
  modified_base 8: mod_base = OTHER; note = 2'-O-methyluridine-3'-phosphate
  modified_base 9: mod_base = OTHER; note = 2'-O-methyluridine-3'-phosphate
  modified_base 10: mod_base = OTHER; note = 2'-O-methylcytidine-3'-phosphate
  modified_base 11: mod_base = OTHER; note = 2'-O-methyladenosine-3'-phosphate
  modified_base 13: mod_base = OTHER; note = 2'-O-methyluridine-3'-phosphate
  modified_base 14: mod_base = OTHER; note = 2'-deoxy-2'-fluorouridine-3'-phosphate
  modified_base 15: mod_base = OTHER; note = 2'-O-methylcytidine-3'-phosphate
  modified_base 16: mod_base = OTHER; note = 2'-O-methyladenosine-3'-phosphate
  modified_base 17: mod_base = OTHER; note = 2'-O-methylguanosine-3'-phosphate
  modified_base 18: mod_base = OTHER; note = 2'-O-methyluridine-3'-phosphate
  modified_base 19: mod_base = OTHER; note = 2'-O-methylguanosine-3'-phosphate
  modified_base 20: mod_base = OTHER; note = 2'-O-methyladenosine-3'-phosphate
  modified_base 21: mod_base = OTHER; note = 2'-O-methyladenosine-3'-phosphorothioate
  modified_base 22: mod_base = OTHER; note = 2'-O-methyladenosine-3'-phosphorothioate
  modified_base 23: mod_base = OTHER; note = 2'-O-methylguanosine
  misc_feature 1: note = RNA
  misc_feature 3..4: note = RNA
  misc_feature 6: note = RNA
  misc_feature 8..11: note = RNA
  misc_feature 13..23: note = RNA
  misc_feature 2: note = DNA
  misc_feature 5: note = DNA
  misc_feature 7: note = DNA
  misc_feature 12: note = DNA
tcatgtattcacttcagtgaaag

SEQ ID NO: 94 - DNA, 23 bp, synthetic construct
  source 1..23: mol_type = other DNA
  modified_base 1: mod_base = OTHER; note = 2'-O-methyluridine-3'-phosphorothioate 5'-(E)-Vinylphosphonate
  modified_base 2: mod_base = OTHER; note = 2'-deoxyadenosine-3'-phosphorothioate
  modified_base 3: mod_base = OTHER; note = 2'-O-methyladenosine-3'-phosphate
  modified_base 4: mod_base = OTHER; note = 2'-O-methyladenosine-3'-phosphate
  modified_base 6: mod_base = OTHER; note = 2'-O-methyladenosine-3'-phosphate
  modified_base 8: mod_base = OTHER; note = 2'-O-methylguanosine-3'-phosphate
  modified_base 9: mod_base = OTHER; note = 2'-O-methyluridine-3'-phosphate
  modified_base 10: mod_base = OTHER; note = 2'-O-methylguanosine-3'-phosphate
  modified_base 11: mod_base = OTHER; note = 2'-O-methylguanosine-3'-phosphate
  modified_base 13: mod_base = OTHER; note = 2'-O-methyladenosine-3'-phosphate
  modified_base 14: mod_base = OTHER; note = 2'-deoxy-2'-fluoroguanosine-3'-phosphate
  modified_base 15: mod_base = OTHER; note = 2'-O-methyluridine-3'-phosphate
  modified_base 16: mod_base = OTHER; note = 2'-O-methylcytidine-3'-phosphate
  modified_base 17: mod_base = OTHER; note = 2'-O-methyladenosine-3'-phosphate
  modified_base 18: mod_base = OTHER; note = 2'-O-methylcytidine-3'-phosphate
  modified_base 19: mod_base = OTHER; note = 2'-O-methyluridine-3'-phosphate
  modified_base 20: mod_base = OTHER; note = 2'-O-methyluridine-3'-phosphate
  modified_base 21: mod_base = OTHER; note = 2'-O-methyladenosine-3'-phosphorothioate
  modified_base 22: mod_base = OTHER; note = 2'-O-methylguanosine-3'-phosphorothioate
  modified_base 23: mod_base = OTHER; note = 2'-O-methylguanosine
  misc_feature 1: note = RNA
  misc_feature 3..4: note = RNA
  misc_feature 6: note = RNA
  misc_feature 8..11: note = RNA
  misc_feature 13..23: note = RNA
  misc_feature 2: note = DNA
  misc_feature 5: note = DNA
  misc_feature 7: note = DNA
  misc_feature 12: note = DNA
taaataagtggtagtcacttagg

SEQ ID NO: 95 - DNA, 23 bp, synthetic construct
  source 1..23: mol_type = other DNA
  modified_base 1: mod_base = OTHER; note = 2'-O-methyluridine-3'-phosphorothioate 5'-(E)-Vinylphosphonate
  modified_base 2: mod_base = OTHER; note = 2'-deoxyguanosine-3'-phosphorothioate
  modified_base 3: mod_base = OTHER; note = 2'-O-methyladenosine-3'-phosphate
  modified_base 4: mod_base = OTHER; note = 2'-O-methyluridine-3'-phosphate
  modified_base 6: mod_base = OTHER; note = 2'-O-methyluridine-3'-phosphate
  modified_base 8: mod_base = OTHER; note = 2'-O-methylguanosine-3'-phosphate
  modified_base 9: mod_base = OTHER; note = 2'-O-methyladenosine-3'-phosphate
  modified_base 10: mod_base = OTHER; note = 2'-O-methyladenosine-3'-phosphate
  modified_base 11: mod_base = OTHER; note = 2'-O-methyladenosine-3'-phosphate
  modified_base 13: mod_base = OTHER; note = 2'-O-methyladenosine-3'-phosphate
  modified_base 14: mod_base = OTHER; note = 2'-deoxy-2'-fluoroadenosine-3'-phosphate
  modified_base 15: mod_base = OTHER; note = 2'-O-methylguanosine-3'-phosphate
  modified_base 16: mod_base = OTHER; note = 2'-O-methyluridine-3'-phosphate
  modified_base 17: mod_base = OTHER; note = 2'-O-methylguanosine-3'-phosphate
  modified_base 18: mod_base = OTHER; note = 2'-O-methylguanosine-3'-phosphate
  modified_base 19: mod_base = OTHER; note = 2'-O-methyluridine-3'-phosphate
  modified_base 20: mod_base = OTHER; note = 2'-O-methyladenosine-3'-phosphate
  modified_base 21: mod_base = OTHER; note = 2'-O-methylguanosine-3'-phosphorothioate
  modified_base 22: mod_base = OTHER; note = 2'-O-methyluridine-3'-phosphorothioate
  modified_base 23: mod_base = OTHER; note = 2'-O-methylcytidine
  misc_feature 1: note = RNA
  misc_feature 3..4: note = RNA
  misc_feature 6: note = RNA
  misc_feature 8..11: note = RNA
  misc_feature 13..23: note = RNA
  misc_feature 2: note = DNA
  misc_feature 5: note = DNA
  misc_feature 7: note = DNA
  misc_feature 12: note = DNA
tgatttagaaataagtggtagtc

SEQ ID NO: 96 - DNA, 23 bp, synthetic construct
  source 1..23: mol_type = other DNA
  modified_base 1: mod_base = OTHER; note = 2'-O-methyluridine-3'-phosphorothioate 5'-(E)-Vinylphosphonate
  modified_base 2: mod_base = OTHER; note = 2'-deoxy-2'-fluoroguanosine-3'-phosphorothioate
  modified_base 3: mod_base = OTHER; note = 2'-O-methyladenosine-3'-phosphate
  modified_base 4: mod_base = OTHER; note = 2'-O-methyluridine-3'-phosphate
  modified_base 6: mod_base = OTHER; note = 2'-O-methyluridine-3'-phosphate
  modified_base 7: mod_base = OTHER; note = Adenosine-glycol nucleic acid (GNA), S-isomer
  modified_base 8: mod_base = OTHER; note = 2'-O-methylguanosine-3'-phosphate
  modified_base 9: mod_base = OTHER; note = 2'-O-methyladenosine-3'-phosphate
  modified_base 10: mod_base = OTHER; note = 2'-O-methyladenosine-3'-phosphate
  modified_base 11: mod_base = OTHER; note = 2'-O-methyladenosine-3'-phosphate
  modified_base 12: mod_base = OTHER; note = 2'-O-methyluridine-3'-phosphate
  modified_base 13: mod_base = OTHER; note = 2'-O-methyladenosine-3'-phosphate
  modified_base 14: mod_base = OTHER; note = 2'-deoxy-2'-fluoroadenosine-3'-phosphate
  modified_base 15: mod_base = OTHER; note = 2'-O-methylguanosine-3'-phosphate
  modified_base 16: mod_base = OTHER; note = 2'-deoxy-2'-fluorouridine-3'-phosphate
  modified_base 17: mod_base = OTHER; note = 2'-O-methylguanosine-3'-phosphate
  modified_base 18: mod_base = OTHER; note = 2'-O-methylguanosine-3'-phosphate
  modified_base 19: mod_base = OTHER; note = 2'-O-methyluridine-3'-phosphate
  modified_base 20: mod_base = OTHER; note = 2'-O-methyladenosine-3'-phosphate
  modified_base 21: mod_base = OTHER; note = 2'-O-methylguanosine-3'-phosphorothioate
  modified_base 22: mod_base = OTHER; note = 2'-O-methyluridine-3'-phosphorothioate
  modified_base 23: mod_base = OTHER; note = 2'-O-methylcytidine
  misc_feature 1..4: note = RNA
  misc_feature 6..23: note = RNA
  misc_feature 5: note = DNA
tgatttagaaataagtggtagtc

SEQ ID NO: 97 - DNA, 23 bp, synthetic construct
  source 1..23: mol_type = other DNA
  modified_base 1: mod_base = OTHER; note = 2'-O-methyluridine-3'-phosphorothioate 5'-(E)-Vinylphosphonate
  modified_base 2: mod_base = OTHER; note = 2'-deoxycytidine-3'-phosphorothioate
  modified_base 3: mod_base = OTHER; note = 2'-O-methyladenosine-3'-phosphate
  modified_base 4: mod_base = OTHER; note = 2'-O-methyluridine-3'-phosphate
  modified_base 6: mod_base = OTHER; note = 2'-O-methylguanosine-3'-phosphate
  modified_base 8: mod_base = OTHER; note = 2'-O-methyluridine-3'-phosphate
  modified_base 9: mod_base = OTHER; note = 2'-O-methyluridine-3'-phosphate
  modified_base 10: mod_base = OTHER; note = 2'-O-methylcytidine-3'-phosphate
  modified_base 11: mod_base = OTHER; note = 2'-O-methyladenosine-3'-phosphate
  modified_base 13: mod_base = OTHER; note = 2'-O-methylguanosine-3'-phosphate
  modified_base 14: mod_base = OTHER; note = 2'-deoxy-2'-fluorocytidine-3'-phosphate
  modified_base 15: mod_base = OTHER; note = 2'-O-methyluridine-3'-phosphate
  modified_base 16: mod_base = OTHER; note = 2'-O-methylcytidine-3'-phosphate
  modified_base 17: mod_base = OTHER; note = 2'-O-methyladenosine-3'-phosphate
  modified_base 18: mod_base = OTHER; note = 2'-O-methylcytidine-3'-phosphate
  modified_base 19: mod_base = OTHER; note = 2'-O-methyladenosine-3'-phosphate
  modified_base 20: mod_base = OTHER; note = 2'-O-methyluridine-3'-phosphate
  modified_base 21: mod_base = OTHER; note = 2'-O-methyladenosine-3'-phosphorothioate
  modified_base 22: mod_base = OTHER; note = 2'-O-methyluridine-3'-phosphorothioate
  modified_base 23: mod_base = OTHER; note = 2'-O-methyluridine
  misc_feature 1: note = RNA
  misc_feature 3..4: note = RNA
  misc_feature 6: note = RNA
  misc_feature 8..11: note = RNA
  misc_feature 13..23: note = RNA
  misc_feature 2: note = DNA
  misc_feature 5: note = DNA
  misc_feature 7: note = DNA
  misc_feature 12: note = DNA
tcatagtttcatgctcacatatt

SEQ ID NO: 98 - DNA, 23 bp, synthetic construct
  source 1..23: mol_type = other DNA
  modified_base 1: mod_base = OTHER; note = 2'-O-methyluridine-3'-phosphorothioate 5'-(E)-Vinylphosphonate
  modified_base 2: mod_base = OTHER; note = 2'-deoxyguanosine-3'-phosphorothioate
  modified_base 3: mod_base = OTHER; note = 2'-O-methyluridine-3'-phosphate
  modified_base 4: mod_base = OTHER; note = 2'-O-methyladenosine-3'-phosphate
  modified_base 6: mod_base = OTHER; note = 2'-O-methyluridine-3'-phosphate
  modified_base 8: mod_base = OTHER; note = 2'-O-methyladenosine-3'-phosphate
  modified_base 9: mod_base = OTHER; note = 2'-O-methyluridine-3'-phosphate
  modified_base 10: mod_base = OTHER; note = 2'-O-methyladenosine-3'-phosphate
  modified_base 11: mod_base = OTHER; note = 2'-O-methylguanosine-3'-phosphate
  modified_base 13: mod_base = OTHER; note = 2'-O-methyluridine-3'-phosphate
  modified_base 14: mod_base = OTHER; note = 2'-deoxy-2'-fluoroguanosine-3'-phosphate
  modified_base 15: mod_base = OTHER; note = 2'-O-methylcytidine-3'-phosphate
  modified_base 16: mod_base = OTHER; note = 2'-O-methyladenosine-3'-phosphate
  modified_base 17: mod_base = OTHER; note = 2'-O-methyluridine-3'-phosphate
  modified_base 18: mod_base = OTHER; note = 2'-O-methyladenosine-3'-phosphate
  modified_base 19: mod_base = OTHER; note = 2'-O-methylguanosine-3'-phosphate
  modified_base 20: mod_base = OTHER; note = 2'-O-methyluridine-3'-phosphate
  modified_base 21: mod_base = OTHER; note = 2'-O-methyluridine-3'-phosphorothioate
  modified_base 22: mod_base = OTHER; note = 2'-O-methyluridine-3'-phosphorothioate
  modified_base 23: mod_base = OTHER; note = 2'-O-methylcytidine
  misc_feature 1: note = RNA
  misc_feature 3..4: note = RNA
  misc_feature 6: note = RNA
  misc_feature 8..11: note = RNA
  misc_feature 13..23: note = RNA
  misc_feature 2: note = DNA
  misc_feature 5: note = DNA
  misc_feature 7: note = DNA
  misc_feature 12: note = DNA
tgtatttataggtgcatagtttc

SEQ ID NO: 99 - RNA, 23 nt, synthetic construct
  source 1..23: mol_type = other RNA
cagtgtggtgtaaaggaattcat

SEQ ID NO: 100 - RNA, 23 nt, synthetic construct
  source 1..23: mol_type = other RNA
agtgtggtgtaaaggaattcatt

SEQ ID NO: 101 - RNA, 23 nt, synthetic construct
  source 1..23: mol_type = other RNA
gtggtgtaaaggaattcattagc

SEQ ID NO: 102 - RNA, 23 nt, synthetic construct
  source 1..23: mol_type = other RNA
tcattagccatggatgtattcat

SEQ ID NO: 103 - RNA, 23 nt, synthetic construct
  source 1..23: mol_type = other RNA
cattagccatggatgtattcatg

SEQ ID NO: 104 - RNA, 23 nt, synthetic construct
  source 1..23: mol_type = other RNA
gtattcatgaaaggactttcaaa

SEQ ID NO: 105 - RNA, 23 nt, synthetic construct
  source 1..23: mol_type = other RNA
attcatgaaaggactttcaaagg

SEQ ID NO: 106 - RNA, 23 nt, synthetic construct
  source 1..23: mol_type = other RNA
caaagagcaagtgacaaatgttg

SEQ ID NO: 107 - RNA, 23 nt, synthetic construct
  source 1..23: mol_type = other RNA
aagagcaagtgacaaatgttgga

SEQ ID NO: 108 - RNA, 23 nt, synthetic construct
  source 1..23: mol_type = other RNA
ggaagggtatcaagactacgaac

SEQ ID NO: 109 - RNA, 23 nt, synthetic construct
  source 1..23: mol_type = other RNA
acctgaagcctaagaaatatctt

SEQ ID NO: 110 - RNA, 23 nt, synthetic construct
  source 1..23: mol_type = other RNA
cctgaagcctaagaaatatcttt

SEQ ID NO: 111 - RNA, 23 nt, synthetic construct
  source 1..23: mol_type = other RNA
tgaagcctaagaaatatctttgc

SEQ ID NO: 112 - RNA, 23 nt, synthetic construct
  source 1..23: mol_type = other RNA
agcctaagaaatatctttgctcc

SEQ ID NO: 113 - RNA, 23 nt, synthetic construct
  source 1..23: mol_type = other RNA
tatctttgctcccagtttcttga

SEQ ID NO: 114 - RNA, 23 nt, synthetic construct
  source 1..23: mol_type = other RNA
tatctttgctcccagtttcttga

SEQ ID NO: 115 - RNA, 23 nt, synthetic construct
  source 1..23: mol_type = other RNA
atctttgctcccagtttcttgag

SEQ ID NO: 116 - RNA, 23 nt, synthetic construct
  source 1..23: mol_type = other RNA
tctttgctcccagtttcttgaga

SEQ ID NO: 117 - RNA, 23 nt, synthetic construct
  source 1..23: mol_type = other RNA
gctcccagtttcttgagatctgc

SEQ ID NO: 118 - RNA, 23 nt, synthetic construct
  source 1..23: mol_type = other RNA
tcctgtacaagtgctcagttcca

SEQ ID NO: 119 - RNA, 23 nt, synthetic construct
  source 1..23: mol_type = other RNA
cctgtacaagtgctcagttccaa

SEQ ID NO: 120 - RNA, 23 nt, synthetic construct
  source 1..23: mol_type = other RNA
ctgtacaagtgctcagttccaat

SEQ ID NO: 121 - RNA, 23 nt, synthetic construct
  source 1..23: mol_type = other RNA
acaagtgctcagttccaatgtgc

SEQ ID NO: 122 - RNA, 23 nt, synthetic construct
  source 1..23: mol_type = other RNA
caagtgctcagttccaatgtgcc

SEQ ID NO: 123 - RNA, 23 nt, synthetic construct
  source 1..23: mol_type = other RNA
tgtgcccagtcatgacatttctc

SEQ ID NO: 124 - RNA, 23 nt, synthetic construct
  source 1..23: mol_type = other RNA
gcccagtcatgacatttctcaaa

SEQ ID NO: 125 - RNA, 23 nt, synthetic construct
  source 1..23: mol_type = other RNA
cagtcatgacatttctcaaagtt

SEQ ID NO: 126 - RNA, 23 nt, synthetic construct
  source 1..23: mol_type = other RNA
gtcatgacatttctcaaagtttt

SEQ ID NO: 127 - RNA, 23 nt, synthetic construct
  source 1..23: mol_type = other RNA
agtcttccatcagcagtgattga

SEQ ID NO: 128 - RNA, 23 nt, synthetic construct
  source 1..23: mol_type = other RNA
tcttccatcagcagtgattgaag

SEQ ID NO: 129 - RNA, 23 nt, synthetic construct
  source 1..23: mol_type = other RNA
ttccatcagcagtgattgaagta

SEQ ID NO: 130 - RNA, 23 nt, synthetic construct
  source 1..23: mol_type = other RNA
ttccatcagcagtgattgaagta

SEQ ID NO: 131 - RNA, 23 nt, synthetic construct
  source 1..23: mol_type = other RNA
ccatcagcagtgattgaagtatc

SEQ ID NO: 132 - RNA, 23 nt, synthetic construct
  source 1..23: mol_type = other RNA
ccatcagcagtgattgaagtatc

SEQ ID NO: 133 - RNA, 23 nt, synthetic construct
  source 1..23: mol_type = other RNA
tcagcagtgattgaagtatctgt

SEQ ID NO: 134 - RNA, 23 nt, synthetic construct
  source 1..23: mol_type = other RNA
cagcagtgattgaagtatctgta

SEQ ID NO: 135 - RNA, 23 nt, synthetic construct
  source 1..23: mol_type = other RNA
cagcagtgattgaagtatctgta

SEQ ID NO: 136 - RNA, 23 nt, synthetic construct
  source 1..23: mol_type = other RNA
ctttcactgaagtgaatacatgg

SEQ ID NO: 137 - RNA, 23 nt, synthetic construct
  source 1..23: mol_type = other RNA
cctaagtgactaccacttatttc

SEQ ID NO: 138 - RNA, 23 nt, synthetic construct
  source 1..23: mol_type = other RNA
gactaccacttatttctaaatcc

SEQ ID NO: 139 - RNA, 23 nt, synthetic construct
  source 1..23: mol_type = other RNA
gactaccacttatttctaaatcc

SEQ ID NO: 140 - RNA, 23 nt, synthetic construct
  source 1..23: mol_type = other RNA
aatatgtgagcatgaaactatgc

SEQ ID NO: 141 - RNA, 23 nt, synthetic construct
  source 1..23: mol_type = other RNA
gaaactatgcacctataaatact

SEQ ID NO: 142 - RNA, 21 nt, synthetic construct
  source 1..21: mol_type = other RNA
gtgtggtgtaaaggaattcaa

SEQ ID NO: 143 - RNA, 21 nt, synthetic construct
  source 1..21: mol_type = other RNA
tgtggtgtaaaggaattcata

SEQ ID NO: 144 - RNA, 21 nt, synthetic construct
  source 1..21: mol_type = other RNA
ggtgtaaaggaattcattaga

SEQ ID NO: 145 - RNA, 21 nt, synthetic construct
  source 1..21: mol_type = other RNA
attagccatggatgtattcaa

SEQ ID NO: 146 - RNA, 21 nt, synthetic construct
  source 1..21: mol_type = other RNA
ttagccatggatgtattcata

SEQ ID NO: 147 - RNA, 21 nt, synthetic construct
  source 1..21: mol_type = other RNA
attcatgaaaggactttcaaa

SEQ ID NO: 148 - RNA, 21 nt, synthetic construct
  source 1..21: mol_type = other RNA
tcatgaaaggactttcaaaga

SEQ ID NO: 149 - RNA, 21 nt, synthetic construct
  source 1..21: mol_type = other RNA
aagagcaagtgacaaatgtta

SEQ ID NO: 150 - RNA, 21 nt, synthetic construct
  source 1..21: mol_type = other RNA
gagcaagtgacaaatgttgga

SEQ ID NO: 151 - RNA, 21 nt, synthetic construct
  source 1..21: mol_type = other RNA
aagggtatcaagactacgaaa

SEQ ID NO: 152 - RNA, 21 nt, synthetic construct
  source 1..21: mol_type = other RNA
ctgaagcctaagaaatatcta

SEQ ID NO: 153 - RNA, 21 nt, synthetic construct
  source 1..21: mol_type = other RNA
tgaagcctaagaaatatctta

SEQ ID NO: 154 - RNA, 21 nt, synthetic construct
  source 1..21: mol_type = other RNA
aagcctaagaaatatctttga

SEQ ID NO: 155 - RNA, 21 nt, synthetic construct
  source 1..21: mol_type = other RNA
cctaagaaatatctttgctca

SEQ ID NO: 156 - RNA, 21 nt, synthetic construct
  source 1..21: mol_type = other RNA
tctttgctcccagtttcttga

SEQ ID NO: 157 - RNA, 21 nt, synthetic construct
  source 1..21: mol_type = other RNA
tctttgctcccagtttcttga

SEQ ID NO: 158 - RNA, 21 nt, synthetic construct
  source 1..21: mol_type = other RNA
ctttgctcccagtttcttgaa

SEQ ID NO: 159 - RNA, 21 nt, synthetic construct
  source 1..21: mol_type = other RNA
tttgctcccagtttcttgaga

SEQ ID NO: 160 - RNA, 21 nt, synthetic construct
  source 1..21: mol_type = other RNA
tcccagtttcttgagatctga

SEQ ID NO: 161 - RNA, 21 nt, synthetic construct
  source 1..21: mol_type = other RNA
ctgtacaagtgctcagttcca

SEQ ID NO: 162 - RNA, 21 nt, synthetic construct
  source 1..21: mol_type = other RNA
tgtacaagtgctcagttccaa

SEQ ID NO: 163 - RNA, 21 nt, synthetic construct
  source 1..21: mol_type = other RNA
gtacaagtgctcagttccaaa

SEQ ID NO: 164 - RNA, 21 nt, synthetic construct
  source 1..21: mol_type = other RNA
aagtgctcagttccaatgtga

SEQ ID NO: 165 - RNA, 21 nt, synthetic construct
  source 1..21: mol_type = other RNA
agtgctcagttccaatgtgca

SEQ ID NO: 166 - RNA, 21 nt, synthetic construct
  source 1..21: mol_type = other RNA
tgcccagtcatgacatttcta

SEQ ID NO: 167 - RNA, 21 nt, synthetic construct
  source 1..21: mol_type = other RNA
ccagtcatgacatttctcaaa

SEQ ID NO: 168 - RNA, 21 nt, synthetic construct
  source 1..21: mol_type = other RNA
gtcatgacatttctcaaagta

SEQ ID NO: 169 - RNA, 21 nt, synthetic construct
  source 1..21: mol_type = other RNA
catgacatttctcaaagttta

SEQ ID NO: 170 - RNA, 21 nt, synthetic construct
  source 1..21: mol_type = other RNA
tcttccatcagcagtgattga

SEQ ID NO: 171 - RNA, 21 nt, synthetic construct
  source 1..21: mol_type = other RNA
ttccatcagcagtgattgaaa

SEQ ID NO: 172 - RNA, 21 nt, synthetic construct
  source 1..21: mol_type = other RNA
ccatcagcagtgattgaagta

SEQ ID NO: 173 - RNA, 21 nt, synthetic construct
  source 1..21: mol_type = other RNA
ccatcagcagtgattgaagta

SEQ ID NO: 174 - RNA, 21 nt, synthetic construct
  source 1..21: mol_type = other RNA
atcagcagtgattgaagtata

SEQ ID NO: 175 - RNA, 21 nt, synthetic construct
  source 1..21: mol_type = other RNA
atcagcagtgattgaagtata

SEQ ID NO: 176 - RNA, 21 nt, synthetic construct
  source 1..21: mol_type = other RNA
agcagtgattgaagtatctga

SEQ ID NO: 177 - RNA, 21 nt, synthetic construct
  source 1..21: mol_type = other RNA
gcagtgattgaagtatctgta

SEQ ID NO: 178 - RNA, 21 nt, synthetic construct
  source 1..21: mol_type = other RNA
gcagtgattgaagtatctgta

SEQ ID NO: 179 - RNA, 21 nt, synthetic construct
  source 1..21: mol_type = other RNA
ttcactgaagtgaatacatga

SEQ ID NO: 180 - RNA, 21 nt, synthetic construct
  source 1..21: mol_type = other RNA
taagtgactaccacttattta

SEQ ID NO: 181 - RNA, 21 nt, synthetic construct
  source 1..21: mol_type = other RNA
ctaccacttatttctaaatca

SEQ ID NO: 182 - RNA, 21 nt, synthetic construct
  source 1..21: mol_type = other RNA
ctaccacttatttctaaatca

SEQ ID NO: 183 - RNA, 21 nt, synthetic construct
  source 1..21: mol_type = other RNA
tatgtgagcatgaaactatga

SEQ ID NO: 184 - RNA, 21 nt, synthetic construct
  source 1..21: mol_type = other RNA
aactatgcacctataaataca

SEQ ID NO: 185 - RNA, 23 nt, synthetic construct
  source 1..23: mol_type = other RNA
  modified_base 7: mod_base = OTHER; note = 5'-methyluridine-3'-phosphate
ttgaattcctttacaccacactg

SEQ ID NO: 186 - RNA, 23 nt, synthetic construct
  source 1..23: mol_type = other RNA
  modified_base 7: mod_base = OTHER; note = 5'-methyluridine-3'-phosphate
  modified_base 12: mod_base = OTHER; note = 5'-methyluridine-3'-phosphate
tatgaattcctttacaccacact

SEQ ID NO: 187 - RNA, 23 nt, synthetic construct
  source 1..23: mol_type = other RNA
tctaatgaattcctttacaccac

SEQ ID NO: 188 - RNA, 23 nt, synthetic construct
  source 1..23: mol_type = other RNA
  modified_base 2: mod_base = OTHER; note = 5'-methyluridine-3'-phosphate
ttgaatacatccatggctaatga

SEQ ID NO: 189 - RNA, 23 nt, synthetic construct
  source 1..23: mol_type = other RNA
  modified_base 7: mod_base = OTHER; note = 5'-methyluridine-3'-phosphate
tatgaatacatccatggctaatg

SEQ ID NO: 190 - RNA, 23 nt, synthetic construct
  source 1..23: mol_type = other RNA
  modified_base 2: mod_base = OTHER; note = 5'-methyluridine-3'-phosphate
  modified_base 12: mod_base = OTHER; note = 5'-methyluridine-3'-phosphate
tttgaaagtcctttcatgaatac

SEQ ID NO: 191 - RNA, 23 nt, synthetic construct
  source 1..23: mol_type = other RNA
  modified_base 5: mod_base = OTHER; note = 5'-methyluridine-3'-phosphate
tctttgaaagtcctttcatgaat

SEQ ID NO: 192 - RNA, 23 nt, synthetic construct
  source 1..23: mol_type = other RNA
  modified_base 7: mod_base = OTHER; note = 5'-methyluridine-3'-phosphate
taacatttgtcacttgctctttg

SEQ ID NO: 193 - RNA, 23 nt, synthetic construct
  source 1..23: mol_type = other RNA
  modified_base 12: mod_base = OTHER; note = 5'-methyluridine-3'-phosphate
tccaacatttgtcacttgctctt

SEQ ID NO: 194 - RNA, 23 nt, synthetic construct
  source 1..23: mol_type = other RNA
  modified_base 2: mod_base = OTHER; note = 5'-methyluridine-3'-phosphate
  modified_base 12: mod_base = OTHER; note = 5'-methyluridine-3'-phosphate
tttcgtagtcttgatacccttcc

SEQ ID NO: 195 - RNA, 23 nt, synthetic construct
  source 1..23: mol_type = other RNA
  modified_base 5: mod_base = OTHER; note = 5'-methyluridine-3'-phosphate
  modified_base 7: mod_base = OTHER; note = 5'-methyluridine-3'-phosphate
  modified_base 12: mod_base = OTHER; note = 5'-methyluridine-3'-phosphate
tagatatttcttaggcttcaggt

SEQ ID NO: 196 - RNA, 23 nt, synthetic construct
  source 1..23: mol_type = other RNA
  modified_base 12: mod_base = OTHER; note = 5'-methyluridine-3'-phosphate
taagatatttcttaggcttcagg

SEQ ID NO: 197 - RNA, 23 nt, synthetic construct
  source 1..23: mol_type = other RNA
  modified_base 12: mod_base = OTHER; note = 5'-methyluridine-3'-phosphate
tcaaagatatttcttaggcttca

SEQ ID NO: 198 - RNA, 23 nt, synthetic construct
  source 1..23: mol_type = other RNA
tgagcaaagatatttcttaggct

SEQ ID NO: 199 - RNA, 23 nt, synthetic construct
  source 1..23: mol_type = other RNA
tcaagaaactgggagcaaagata

SEQ ID NO: 200 - RNA, 23 nt, synthetic construct
  source 1..23: mol_type = other RNA
tcaagaaactgggagcaaagata

SEQ ID NO: 201 - RNA, 23 nt, synthetic construct
  source 1..23: mol_type = other RNA
  modified_base 2: mod_base = OTHER; note = 5'-methyluridine-3'-phosphate
ttcaagaaactgggagcaaagat

SEQ ID NO: 202 - RNA, 23 nt, synthetic construct
  source 1..23: mol_type = other RNA
  modified_base 12: mod_base = OTHER; note = 5'-methyluridine-3'-phosphate
tctcaagaaactgggagcaaaga

SEQ ID NO: 203 - RNA, 23 nt, synthetic construct
  source 1..23: mol_type = other RNA
tcagatctcaagaaactgggagc

SEQ ID NO: 204 - RNA, 23 nt, synthetic construct
  source 1..23: mol_type = other RNA
  modified_base 7: mod_base = OTHER; note = 5'-methyluridine-3'-phosphate
tggaactgagcacttgtacagga

SEQ ID NO: 205 - RNA, 23 nt, synthetic construct
  source 1..23: mol_type = other RNA
ttggaactgagcacttgtacagg

SEQ ID NO: 206 - RNA, 23 nt, synthetic construct
  source 1..23: mol_type = other RNA
tttggaactgagcacttgtacag

SEQ ID NO: 207 - RNA, 23 nt, synthetic construct
  source 1..23: mol_type = other RNA
  modified_base 7: mod_base = OTHER; note = 5'-methyluridine-3'-phosphate
tcacattggaactgagcacttgt

SEQ ID NO: 208 - RNA, 23 nt, synthetic construct
  source 1..23: mol_type = other RNA
  modified_base 7: mod_base = OTHER; note = 5'-methyluridine-3'-phosphate
tgcacattggaactgagcacttg

SEQ ID NO: 209 - RNA, 23 nt, synthetic construct
  source 1..23: mol_type = other RNA
  modified_base 7: mod_base = OTHER; note = 5'-methyluridine-3'-phosphate
  modified_base 12: mod_base = OTHER; note = 5'-methyluridine-3'-phosphate
tagaaatgtcatgactgggcaca

SEQ ID NO: 210 - RNA, 23 nt, synthetic construct
  source 1..23: mol_type = other RNA
  modified_base 2: mod_base = OTHER; note = 5'-methyluridine-3'-phosphate
  modified_base 12: mod_base = OTHER; note = 5'-methyluridine-3'-phosphate
tttgagaaatgtcatgactgggc

SEQ ID NO: 211 - RNA, 23 nt, synthetic construct
  source 1..23: mol_type = other RNA
  modified_base 5: mod_base = OTHER; note = 5'-methyluridine-3'-phosphate
tactttgagaaatgtcatgactg

SEQ ID NO: 212 - RNA, 23 nt, synthetic construct
  source 1..23: mol_type = other RNA
  modified_base 7: mod_base = OTHER; note = 5'-methyluridine-3'-phosphate
taaactttgagaaatgtcatgac

SEQ ID NO: 213 - RNA, 23 nt, synthetic construct
  source 1..23: mol_type = other RNA
  modified_base 5: mod_base = OTHER; note = 5'-methyluridine-3'-phosphate
  modified_base 12: mod_base = OTHER; note = 5'-methyluridine-3'-phosphate
tcaatcactgctgatggaagact

SEQ ID NO: 214 - RNA, 23 nt, synthetic construct
  source 1..23: mol_type = other RNA
  modified_base 7: mod_base = OTHER; note = 5'-methyluridine-3'-phosphate
tttcaatcactgctgatggaaga

SEQ ID NO: 215 - RNA, 23 nt, synthetic construct
  source 1..23: mol_type = other RNA
  modified_base 5: mod_base = OTHER; note = 5'-methyluridine-3'-phosphate
tacttcaatcactgctgatggaa

SEQ ID NO: 216 - RNA, 23 nt, synthetic construct
  source 1..23: mol_type = other RNA
  modified_base 5: mod_base = OTHER; note = 5'-methyluridine-3'-phosphate
tacttcaatcactgctgatggaa

SEQ ID NO: 217 - RNA, 23 nt, synthetic construct
  source 1..23: mol_type = other RNA
  modified_base 7: mod_base = OTHER; note = 5'-methyluridine-3'-phosphate
tatacttcaatcactgctgatgg

SEQ ID NO: 218 - RNA, 23 nt, synthetic construct
  source 1..23: mol_type = other RNA
  modified_base 7: mod_base = OTHER; note = 5'-methyluridine-3'-phosphate
tatacttcaatcactgctgatgg

SEQ ID NO: 219 - RNA, 23 nt, synthetic construct
  source 1..23: mol_type = other RNA
tcagatacttcaatcactgctga

SEQ ID NO: 220 - RNA, 23 nt, synthetic construct
  source 1..23: mol_type = other RNA
  modified_base 7: mod_base = OTHER; note = 5'-methyluridine-3'-phosphate
tacagatacttcaatcactgctg

SEQ ID NO: 221 - RNA, 23 nt, synthetic construct
  source 1..23: mol_type = other RNA
  modified_base 7: mod_base = OTHER; note = 5'-methyluridine-3'-phosphate
tacagatacttcaatcactgctg

SEQ ID NO: 222 - RNA, 23 nt, synthetic construct
  source 1..23: mol_type = other RNA
tcatgtattcacttcagtgaaag

SEQ ID NO: 223 - RNA, 23 nt, synthetic construct
  source 1..23: mol_type = other RNA
  modified_base 5: mod_base = OTHER; note = 5'-methyluridine-3'-phosphate
  modified_base 12: mod_base = OTHER; note = 5'-methyluridine-3'-phosphate
taaataagtggtagtcacttagg

SEQ ID NO: 224 - RNA, 23 nt, synthetic construct
  source 1..23: mol_type = other RNA
  modified_base 5: mod_base = OTHER; note = 5'-methyluridine-3'-phosphate
  modified_base 12: mod_base = OTHER; note = 5'-methyluridine-3'-phosphate
tgatttagaaataagtggtagtc

SEQ ID NO: 225 - RNA, 23 nt, synthetic construct
  source 1..23: mol_type = other RNA
  modified_base 5: mod_base = OTHER; note = 5'-methyluridine-3'-phosphate
tgatttagaaataagtggtagtc

SEQ ID NO: 226 - RNA, 23 nt, synthetic construct
  source 1..23: mol_type = other RNA
  modified_base 7: mod_base = OTHER; note = 5'-methyluridine-3'-phosphate
  modified_base 12: mod_base = OTHER; note = 5'-methyluridine-3'-phosphate
tcatagtttcatgctcacatatt

SEQ ID NO: 227 - RNA, 23 nt, synthetic construct
  source 1..23: mol_type = other RNA
  modified_base 5: mod_base = OTHER; note = 5'-methyluridine-3'-phosphate
  modified_base 7: mod_base = OTHER; note = 5'-methyluridine-3'-phosphate
tgtatttataggtgcatagtttc

SEQ ID NO: 228 - DNA, 1493 bp, unidentified
  source 1..1493: mol_type = other DNA; note = Canis lupus familiaris
cggcagaggggcggggagaggcgctgacaaatcagctgcgggggcggtgagccgaggagaaggaggagaaagaggaaggggaggaagaccacgacgacttgcaggggacccgagagagggggtgagagaccgagcgcggcagcgtgggggtgagtgtggtgtgaacgaattcattagccatggatgtattcatgaaaggactttcaaaggccaaggagggagtcgtggctgctgctgaaaaaaccaaacagggtgtggcagaagcagcaggaaagacaaaagagggtgtcctctatgtaggctccaaaaccaaggaaggagtggttcatggtgtgacaacagtggctgagaagaccaaagagcaagtgacaaatgttggtgaggccgtggtgacaggggtgacagcagtagcacaaaagacagtggagggagcagggagcatcgcagctgctactggctttggcaaaaaggatcagttgggcaagagtgaagaaggaggcccacaggaaggaattctggaagatatgcctgttgatcctgacaatgaggcatatgaaatgccttctgaggaagggtatcaagactatgaacccgaagcctaagaaatacttttgctcccagtttcttgagacctactgacagatgttccatcctgtacaagtactcagttccaaaatgcccagtcataacattttctcaaaatttttacagtgtattttaaactcttccatcagcagtgattgaagttatctgtaccagcccctactcagcatttcagtgcttccctctcactgaagtgattatatggtagcagggtcctcccttgtgtgctgtgtggatattgtggcttcaaatctaaaatgttaaattaaagcacctaagtgactaccacttatttctaaatcttcactatttttttgttgctgttattgagaagttgtgatttactatcatatattataagatttctaggtgtcttttaatgattatttctgtttaaaaaataatgatgtgttgtgaaatttgttaatatatacaatacttagaaacatgttagcatgaaactatgcacctataaatattaactatgaaattttactgttttgtgatgtgttttattaatttgtgtttatatataaatgctgaaaattaaaatgttatctcattacaaaaatcttatttttaatcccatctcactttaataataaaatcatgcttataacaatatgaactgagaactgacacaattaacttaaagctcttgacagccatttgaaggagaaggaattttagaagaattaagcagacaagatggaacattaatcctttactctggaaattcactgaagcaacactacccaaagtatcctgacatgcagtggtgtcttaagaggttatatggaaaaaaaaaaaaacgggttccatggaatagtgagtttaagaaattattttgactatgtctgcttcaaatattaataaaacatattagcaca

SEQ ID NO: 229 - DNA, 1493 bp, unidentified
  source 1..1493: mol_type = other DNA; note = Canis lupus familiaris
tgtgctaatatgttttattaatatttgaagcagacatagtcaaaataatttcttaaactcactattccatggaacccgtttttttttttttccatataacctcttaagacaccactgcatgtcaggatactttgggtagtgttgcttcagtgaatttccagagtaaaggattaatgttccatcttgtctgcttaattcttctaaaattccttctccttcaaatggctgtcaagagctttaagttaattgtgtcagttctcagttcatattgttataagcatgattttattattaaagtgagatgggattaaaaataagatttttgtaatgagataacattttaattttcagcatttatatataaacacaaattaataaaacacatcacaaaacagtaaaatttcatagttaatatttataggtgcatagtttcatgctaacatgtttctaagtattgtatatattaacaaatttcacaacacatcattattttttaaacagaaataatcattaaaagacacctagaaatcttataatatatgatagtaaatcacaacttctcaataacagcaacaaaaaaatagtgaagatttagaaataagtggtagtcacttaggtgctttaatttaacattttagatttgaagccacaatatccacacagcacacaagggaggaccctgctaccatataatcacttcagtgagagggaagcactgaaatgctgagtaggggctggtacagataacttcaatcactgctgatggaagagtttaaaatacactgtaaaaattttgagaaaatgttatgactgggcattttggaactgagtacttgtacaggatggaacatctgtcagtaggtctcaagaaactgggagcaaaagtatttcttaggcttcgggttcatagtcttgatacccttcctcagaaggcatttcatatgcctcattgtcaggatcaacaggcatatcttccagaattccttcctgtgggcctccttcttcactcttgcccaactgatcctttttgccaaagccagtagcagctgcgatgctccctgctccctccactgtcttttgtgctactgctgtcacccctgtcaccacggcctcaccaacatttgtcacttgctctttggtcttctcagccactgttgtcacaccatgaaccactccttccttggttttggagcctacatagaggacaccctcttttgtctttcctgctgcttctgccacaccctgtttggttttttcagcagcagccacgactccctccttggcctttgaaagtcctttcatgaatacatccatggctaatgaattcgttcacaccacactcacccccacgctgccgcgctcggtctctcaccccctctctcgggtcccctgcaagtcgtcgtggtcttcctccccttcctctttctcctccttctcctcggctcaccgcccccgcagctgatttgtcagcgcctctccccgcccctctgccg

SEQ ID NO: 230 - DNA, 3396 bp, Homo sapiens
  source 1..3396: mol_type = other DNA
ggcgacgaccagaaggggcccaagagagggggcgagcgaccgagcgccgcgacgcggaagtgaggtgcgtgcgggctgcagcgcagaccccggcccggcccctccgagagcgtcctgggcgctccctcacgccttgccttcaagccttctgcctttccaccctcgtgagcggagaactgggagtggccattcgacgacaggttagcgggtttgcctcccactcccccagcctcgcgtcgccggctcacagcggcctcctctggggacagtcccccccgggtgccgcctccgcccttcctgtgcgctccttttccttcttctttcctattaaatattatttgggaattgtttaaattttttttttaaaaaaagagagaggcggggaggagtcggagttgtggagaagcagagggactcagtgtggtgtaaaggaattcattagccatggatgtattcatgaaaggactttcaaaggccaaggagggagttgtggctgctgctgagaaaaccaaacagggtgtggcagaagcagcaggaaagacaaaagagggtgttctctatgtaggctccaaaaccaaggagggagtggtgcatggtgtggcaacagtggctgagaagaccaaagagcaagtgacaaatgttggaggagcagtggtgacgggtgtgacagcagtagcccagaagacagtggagggagcagggagcattgcagcagccactggctttgtcaaaaaggaccagttgggcaagaatgaagaaggagccccacaggaaggaattctggaagatatgcctgtggatcctgacaatgaggcttatgaaatgccttctgaggaagggtatcaagactacgaacctgaagcctaagaaatatctttgctcccagtttcttgagatctgctgacagatgttccatcctgtacaagtgctcagttccaatgtgcccagtcatgacatttctcaaagtttttacagtgtatctcgaagtcttccatcagcagtgattgaagtatctgtacctgcccccactcagcatttcggtgcttccctttcactgaagtgaatacatggtagcagggtctttgtgtgctgtggattttgtggcttcaatctacgatgttaaaacaaattaaaaacacctaagtgactaccacttatttctaaatcctcactatttttttgttgctgttgttcagaagttgttagtgatttgctatcatatattataagatttttaggtgtcttttaatgatactgtctaagaataatgacgtattgtgaaatttgttaatatatataatacttaaaaatatgtgagcatgaaactatgcacctataaatactaaatatgaaattttaccattttgcgatgtgttttattcacttgtgtttgtatataaatggtgagaattaaaataaaacgttatctcattgcaaaaatattttatttttatcccatctcactttaataataaaaatcatgcttataagcaacatgaattaagaactgacacaaaggacaaaaatataaagttattaatagccatttgaagaaggaggaattttagaagaggtagagaaaatggaacattaaccctacactcggaattccctgaagcaacactgccagaagtgtgttttggtatgcactggttccttaagtggctgtgattaattattgaaagtggggtgttgaagaccccaactactattgtagagtggtctatttctcccttcaatcctgtcaatgtttgctttacgtattttggggaactgttgtttgatgtgtatgtgtttataattgttatacatttttaattgagccttttattaacatatattgttatttttgtctcgaaataattttttagttaaaatctattttgtctgatattggtgtgaatgctgtacctttctgacaataaataatattcgaccatgaataaaaaaaaaaaaaaagtgggttcccgggaactaagcagtgtagaagatgattttgactacaccctccttagagagccataagacacattagcacatattagcacattcaaggctctgagagaatgtggttaactttgtttaactcagcattcctcactttttttttttaatcatcagaaattctctctctctctctctctttttctctcgctctctttttttttttttttttacaggaaatgcctttaaacatcgttggaactaccagagtcaccttaaaggagatcaattctctagactgataaaaatttcatggcctcctttaaatgttgccaaatatatgaattctaggatttttccttaggaaaggtttttctctttcagggaagatctattaactccccatgggtgctgaaaataaacttgatggtgaaaaactctgtataaattaatttaaaaattatttggtttctctttttaattattctggggcatagtcatttctaaaagtcactagtagaaagtataatttcaagacagaatattctagacatgctagcagtttatatgtattcatgagtaatgtgatatatattgggcgctggtgaggaaggaaggaggaatgagtgactataaggatggttaccatagaaacttccttttttacctaattgaagagagactactacagagtgctaagctgcatgtgtcatcttacactagagagaaatggtaagtttcttgttttatttaagttatgtttaagcaaggaaaggatttgttattgaacagtatatttcaggaaggttagaaagtggcggttaggatatattttaaatctacctaaagcagcatattttaaaaatttaaaagtattggtattaaattaagaaatagaggacagaactagactgatagcagtgacctagaacaatttgagattaggaaagttgtgaccatgaatttaaggatttatgtggatacaaattctcctttaaagtgtttcttcccttaatatttatctgacggtaatttttgagcagtgaattactttatatatcttaatagtttatttgggaccaaacacttaaacaaaaagttctttaagtcatataagccttttcaggaagcttgtctcatattcactcccgagacattcacctgccaagtggcctgaggatcaatccagtcctaggtttattttgcagacttacattctcccaagttattcagcctcatatgactccacggtcggctttaccaaaacagttcagagtgcactttggcacacaattgggaacagaacaatctaatgtgtggtttggtattccaagtggggtctttttcagaatctctgcactagtgtgagatgcaaacatgtttcctcatctttctggcttatccagtatgtagctatttgtgacataataaatatatacatatatgaaaata

SEQ ID NO: 231 - DNA, 3030 bp, Homo sapiens
  source 1..3030: mol_type = other DNA
gcttctccattctggtgtgatccaggaacagctgtcttccagctctgaaagagtgtggtgtaaaggaattcattagccatggatgtattcatgaaaggactttcaaaggccaaggagggagttgtggctgctgctgagaaaaccaaacagggtgtggcagaagcagcaggaaagacaaaagagggtgttctctatgtaggctccaaaaccaaggagggagtggtgcatggtgtggcaacagtggctgagaagaccaaagagcaagtgacaaatgttggaggagcagtggtgacgggtgtgacagcagtagcccagaagacagtggagggagcagggagcattgcagcagccactggctttgtcaaaaaggaccagttgggcaagaatgaagaaggagccccacaggaaggaattctggaagatatgcctgtggatcctgacaatgaggcttatgaaatgccttctgaggaagggtatcaagactacgaacctgaagcctaagaaatatctttgctcccagtttcttgagatctgctgacagatgttccatcctgtacaagtgctcagttccaatgtgcccagtcatgacatttctcaaagtttttacagtgtatctcgaagtcttccatcagcagtgattgaagtatctgtacctgcccccactcagcatttcggtgcttccctttcactgaagtgaatacatggtagcagggtctttgtgtgctgtggattttgtggcttcaatctacgatgttaaaacaaattaaaaacacctaagtgactaccacttatttctaaatcctcactatttttttgttgctgttgttcagaagttgttagtgatttgctatcatatattataagatttttaggtgtcttttaatgatactgtctaagaataatgacgtattgtgaaatttgttaatatatataatacttaaaaatatgtgagcatgaaactatgcacctataaatactaaatatgaaattttaccattttgcgatgtgttttattcacttgtgtttgtatataaatggtgagaattaaaataaaacgttatctcattgcaaaaatattttatttttatcccatctcactttaataataaaaatcatgcttataagcaacatgaattaagaactgacacaaaggacaaaaatataaagttattaatagccatttgaagaaggaggaattttagaagaggtagagaaaatggaacattaaccctacactcggaattccctgaagcaacactgccagaagtgtgttttggtatgcactggttccttaagtggctgtgattaattattgaaagtggggtgttgaagaccccaactactattgtagagtggtctatttctcccttcaatcctgtcaatgtttgctttacgtattttggggaactgttgtttgatgtgtatgtgtttataattgttatacatttttaattgagccttttattaacatatattgttatttttgtctcgaaataattttttagttaaaatctattttgtctgatattggtgtgaatgctgtacctttctgacaataaataatattcgaccatgaataaaaaaaaaaaaaaagtgggttcccgggaactaagcagtgtagaagatgattttgactacaccctccttagagagccataagacacattagcacatattagcacattcaaggctctgagagaatgtggttaactttgtttaactcagcattcctcactttttttttttaatcatcagaaattctctctctctctctctctttttctctcgctctctttttttttttttttttacaggaaatgcctttaaacatcgttggaactaccagagtcaccttaaaggagatcaattctctagactgataaaaatttcatggcctcctttaaatgttgccaaatatatgaattctaggatttttccttaggaaaggtttttctctttcagggaagatctattaactccccatgggtgctgaaaataaacttgatggtgaaaaactctgtataaattaatttaaaaattatttggtttctctttttaattattctggggcatagtcatttctaaaagtcactagtagaaagtataatttcaagacagaatattctagacatgctagcagtttatatgtattcatgagtaatgtgatatatattgggcgctggtgaggaaggaaggaggaatgagtgactataaggatggttaccatagaaacttccttttttacctaattgaagagagactactacagagtgctaagctgcatgtgtcatcttacactagagagaaatggtaagtttcttgttttatttaagttatgtttaagcaaggaaaggatttgttattgaacagtatatttcaggaaggttagaaagtggcggttaggatatattttaaatctacctaaagcagcatattttaaaaatttaaaagtattggtattaaattaagaaatagaggacagaactagactgatagcagtgacctagaacaatttgagattaggaaagttgtgaccatgaatttaaggatttatgtggatacaaattctcctttaaagtgtttcttcccttaatatttatctgacggtaatttttgagcagtgaattactttatatatcttaatagtttatttgggaccaaacacttaaacaaaaagttctttaagtcatataagccttttcaggaagcttgtctcatattcactcccgagacattcacctgccaagtggcctgaggatcaatccagtcctaggtttattttgcagacttacattctcccaagttattcagcctcatatgactccacggtcggctttaccaaaacagttcagagtgcactttggcacacaattgggaacagaacaatctaatgtgtggtttggtattccaagtggggtctttttcagaatctctgcactagtgtgagatgcaaacatgtttcctcatctttctggcttatccagtatgtagctatttgtgacataataaatatatacatatatgaaaata

SEQ ID NO: 232 - DNA, 3177 bp, Homo sapiens
  source 1..3177: mol_type = other DNA
ggcgacgaccagaaggggcccaagagagggggcgagcgaccgagcgccgcgacgcggaagtgaggtgcgtgcgggctgcagcgcagaccccggcccggcccctccgagagcgtcctgggcgctccctcacgccttgccttcaagccttctgcctttccaccctcgtgagcggagaactgggagtggccattcgacgacagtgtggtgtaaaggaattcattagccatggatgtattcatgaaaggactttcaaaggccaaggagggagttgtggctgctgctgagaaaaccaaacagggtgtggcagaagcagcaggaaagacaaaagagggtgttctctatgtaggctccaaaaccaaggagggagtggtgcatggtgtggcaacagtggctgagaagaccaaagagcaagtgacaaatgttggaggagcagtggtgacgggtgtgacagcagtagcccagaagacagtggagggagcagggagcattgcagcagccactggctttgtcaaaaaggaccagttgggcaagaatgaagaaggagccccacaggaaggaattctggaagatatgcctgtggatcctgacaatgaggcttatgaaatgccttctgaggaagggtatcaagactacgaacctgaagcctaagaaatatctttgctcccagtttcttgagatctgctgacagatgttccatcctgtacaagtgctcagttccaatgtgcccagtcatgacatttctcaaagtttttacagtgtatctcgaagtcttccatcagcagtgattgaagtatctgtacctgcccccactcagcatttcggtgcttccctttcactgaagtgaatacatggtagcagggtctttgtgtgctgtggattttgtggcttcaatctacgatgttaaaacaaattaaaaacacctaagtgactaccacttatttctaaatcctcactatttttttgttgctgttgttcagaagttgttagtgatttgctatcatatattataagatttttaggtgtcttttaatgatactgtctaagaataatgacgtattgtgaaatttgttaatatatataatacttaaaaatatgtgagcatgaaactatgcacctataaatactaaatatgaaattttaccattttgcgatgtgttttattcacttgtgtttgtatataaatggtgagaattaaaataaaacgttatctcattgcaaaaatattttatttttatcccatctcactttaataataaaaatcatgcttataagcaacatgaattaagaactgacacaaaggacaaaaatataaagttattaatagccatttgaagaaggaggaattttagaagaggtagagaaaatggaacattaaccctacactcggaattccctgaagcaacactgccagaagtgtgttttggtatgcactggttccttaagtggctgtgattaattattgaaagtggggtgttgaagaccccaactactattgtagagtggtctatttctcccttcaatcctgtcaatgtttgctttacgtattttggggaactgttgtttgatgtgtatgtgtttataattgttatacatttttaattgagccttttattaacatatattgttatttttgtctcgaaataattttttagttaaaatctattttgtctgatattggtgtgaatgctgtacctttctgacaataaataatattcgaccatgaataaaaaaaaaaaaaaagtgggttcccgggaactaagcagtgtagaagatgattttgactacaccctccttagagagccataagacacattagcacatattagcacattcaaggctctgagagaatgtggttaactttgtttaactcagcattcctcactttttttttttaatcatcagaaattctctctctctctctctctttttctctcgctctctttttttttttttttttacaggaaatgcctttaaacatcgttggaactaccagagtcaccttaaaggagatcaattctctagactgataaaaatttcatggcctcctttaaatgttgccaaatatatgaattctaggatttttccttaggaaaggtttttctctttcagggaagatctattaactccccatgggtgctgaaaataaacttgatggtgaaaaactctgtataaattaatttaaaaattatttggtttctctttttaattattctggggcatagtcatttctaaaagtcactagtagaaagtataatttcaagacagaatattctagacatgctagcagtttatatgtattcatgagtaatgtgatatatattgggcgctggtgaggaaggaaggaggaatgagtgactataaggatggttaccatagaaacttccttttttacctaattgaagagagactactacagagtgctaagctgcatgtgtcatcttacactagagagaaatggtaagtttcttgttttatttaagttatgtttaagcaaggaaaggatttgttattgaacagtatatttcaggaaggttagaaagtggcggttaggatatattttaaatctacctaaagcagcatattttaaaaatttaaaagtattggtattaaattaagaaatagaggacagaactagactgatagcagtgacctagaacaatttgagattaggaaagttgtgaccatgaatttaaggatttatgtggatacaaattctcctttaaagtgtttcttcccttaatatttatctgacggtaatttttgagcagtgaattactttatatatcttaatagtttatttgggaccaaacacttaaacaaaaagttctttaagtcatataagccttttcaggaagcttgtctcatattcactcccgagacattcacctgccaagtggcctgaggatcaatccagtcctaggtttattttgcagacttacattctcccaagttattcagcctcatatgactccacggtcggctttaccaaaacagttcagagtgcactttggcacacaattgggaacagaacaatctaatgtgtggtttggtattccaagtggggtctttttcagaatctctgcactagtgtgagatgcaaacatgtttcctcatctttctggcttatccagtatgtagctatttgtgacataataaatatatacatatatgaaaata

SEQ ID NO: 233 - DNA, 3099 bp, Homo sapiens
  source 1..3099: mol_type = other DNA
gcttctccattctggtgtgatccaggaacagctgtcttccagctctgaaagagggctgagagattaggctgcttctccgggatccgcttttccccgggaaacgcgaggatgctccatggagctgtggtgtaaaggaattcattagccatggatgtattcatgaaaggactttcaaaggccaaggagggagttgtggctgctgctgagaaaaccaaacagggtgtggcagaagcagcaggaaagacaaaagagggtgttctctatgtaggctccaaaaccaaggagggagtggtgcatggtgtggcaacagtggctgagaagaccaaagagcaagtgacaaatgttggaggagcagtggtgacgggtgtgacagcagtagcccagaagacagtggagggagcagggagcattgcagcagccactggctttgtcaaaaaggaccagttgggcaagaatgaagaaggagccccacaggaaggaattctggaagatatgcctgtggatcctgacaatgaggcttatgaaatgccttctgaggaagggtatcaagactacgaacctgaagcctaagaaatatctttgctcccagtttcttgagatctgctgacagatgttccatcctgtacaagtgctcagttccaatgtgcccagtcatgacatttctcaaagtttttacagtgtatctcgaagtcttccatcagcagtgattgaagtatctgtacctgcccccactcagcatttcggtgcttccctttcactgaagtgaatacatggtagcagggtctttgtgtgctgtggattttgtggcttcaatctacgatgttaaaacaaattaaaaacacctaagtgactaccacttatttctaaatcctcactatttttttgttgctgttgttcagaagttgttagtgatttgctatcatatattataagatttttaggtgtcttttaatgatactgtctaagaataatgacgtattgtgaaatttgttaatatatataatacttaaaaatatgtgagcatgaaactatgcacctataaatactaaatatgaaattttaccattttgcgatgtgttttattcacttgtgtttgtatataaatggtgagaattaaaataaaacgttatctcattgcaaaaatattttatttttatcccatctcactttaataataaaaatcatgcttataagcaacatgaattaagaactgacacaaaggacaaaaatataaagttattaatagccatttgaagaaggaggaattttagaagaggtagagaaaatggaacattaaccctacactcggaattccctgaagcaacactgccagaagtgtgttttggtatgcactggttccttaagtggctgtgattaattattgaaagtggggtgttgaagaccccaactactattgtagagtggtctatttctcccttcaatcctgtcaatgtttgctttacgtattttggggaactgttgtttgatgtgtatgtgtttataattgttatacatttttaattgagccttttattaacatatattgttatttttgtctcgaaataattttttagttaaaatctattttgtctgatattggtgtgaatgctgtacctttctgacaataaataatattcgaccatgaataaaaaaaaaaaaaaagtgggttcccgggaactaagcagtgtagaagatgattttgactacaccctccttagagagccataagacacattagcacatattagcacattcaaggctctgagagaatgtggttaactttgtttaactcagcattcctcactttttttttttaatcatcagaaattctctctctctctctctctttttctctcgctctctttttttttttttttttacaggaaatgcctttaaacatcgttggaactaccagagtcaccttaaaggagatcaattctctagactgataaaaatttcatggcctcctttaaatgttgccaaatatatgaattctaggatttttccttaggaaaggtttttctctttcagggaagatctattaactccccatgggtgctgaaaataaacttgatggtgaaaaactctgtataaattaatttaaaaattatttggtttctctttttaattattctggggcatagtcatttctaaaagtcactagtagaaagtataatttcaagacagaatattctagacatgctagcagtttatatgtattcatgagtaatgtgatatatattgggcgctggtgaggaaggaaggaggaatgagtgactataaggatggttaccatagaaacttccttttttacctaattgaagagagactactacagagtgctaagctgcatgtgtcatcttacactagagagaaatggtaagtttcttgttttatttaagttatgtttaagcaaggaaaggatttgttattgaacagtatatttcaggaaggttagaaagtggcggttaggatatattttaaatctacctaaagcagcatattttaaaaatttaaaagtattggtattaaattaagaaatagaggacagaactagactgatagcagtgacctagaacaatttgagattaggaaagttgtgaccatgaatttaaggatttatgtggatacaaattctcctttaaagtgtttcttcccttaatatttatctgacggtaatttttgagcagtgaattactttatatatcttaatagtttatttgggaccaaacacttaaacaaaaagttctttaagtcatataagccttttcaggaagcttgtctcatattcactcccgagacattcacctgccaagtggcctgaggatcaatccagtcctaggtttattttgcagacttacattctcccaagttattcagcctcatatgactccacggtcggctttaccaaaacagttcagagtgcactttggcacacaattgggaacagaacaatctaatgtgtggtttggtattccaagtggggtctttttcagaatctctgcactagtgtgagatgcaaacatgtttcctcatctttctggcttatccagtatgtagctatttgtgacataataaatatatacatatatgaaaata

SEQ ID NO: 234 - DNA, 3041 bp, Homo sapiens
  source 1..3041: mol_type = other DNA
ggcgacgaccagaaggggcccaagagagggggcgagcgaccgagcgccgcgacgcggaagtgagtgtggtgtaaaggaattcattagccatggatgtattcatgaaaggactttcaaaggccaaggagggagttgtggctgctgctgagaaaaccaaacagggtgtggcagaagcagcaggaaagacaaaagagggtgttctctatgtaggctccaaaaccaaggagggagtggtgcatggtgtggcaacagtggctgagaagaccaaagagcaagtgacaaatgttggaggagcagtggtgacgggtgtgacagcagtagcccagaagacagtggagggagcagggagcattgcagcagccactggctttgtcaaaaaggaccagttgggcaagaatgaagaaggagccccacaggaaggaattctggaagatatgcctgtggatcctgacaatgaggcttatgaaatgccttctgaggaagggtatcaagactacgaacctgaagcctaagaaatatctttgctcccagtttcttgagatctgctgacagatgttccatcctgtacaagtgctcagttccaatgtgcccagtcatgacatttctcaaagtttttacagtgtatctcgaagtcttccatcagcagtgattgaagtatctgtacctgcccccactcagcatttcggtgcttccctttcactgaagtgaatacatggtagcagggtctttgtgtgctgtggattttgtggcttcaatctacgatgttaaaacaaattaaaaacacctaagtgactaccacttatttctaaatcctcactatttttttgttgctgttgttcagaagttgttagtgatttgctatcatatattataagatttttaggtgtcttttaatgatactgtctaagaataatgacgtattgtgaaatttgttaatatatataatacttaaaaatatgtgagcatgaaactatgcacctataaatactaaatatgaaattttaccattttgcgatgtgttttattcacttgtgtttgtatataaatggtgagaattaaaataaaacgttatctcattgcaaaaatattttatttttatcccatctcactttaataataaaaatcatgcttataagcaacatgaattaagaactgacacaaaggacaaaaatataaagttattaatagccatttgaagaaggaggaattttagaagaggtagagaaaatggaacattaaccctacactcggaattccctgaagcaacactgccagaagtgtgttttggtatgcactggttccttaagtggctgtgattaattattgaaagtggggtgttgaagaccccaactactattgtagagtggtctatttctcccttcaatcctgtcaatgtttgctttacgtattttggggaactgttgtttgatgtgtatgtgtttataattgttatacatttttaattgagccttttattaacatatattgttatttttgtctcgaaataattttttagttaaaatctattttgtctgatattggtgtgaatgctgtacctttctgacaataaataatattcgaccatgaataaaaaaaaaaaaaaagtgggttcccgggaactaagcagtgtagaagatgattttgactacaccctccttagagagccataagacacattagcacatattagcacattcaaggctctgagagaatgtggttaactttgtttaactcagcattcctcactttttttttttaatcatcagaaattctctctctctctctctctttttctctcgctctctttttttttttttttttacaggaaatgcctttaaacatcgttggaactaccagagtcaccttaaaggagatcaattctctagactgataaaaatttcatggcctcctttaaatgttgccaaatatatgaattctaggatttttccttaggaaaggtttttctctttcagggaagatctattaactccccatgggtgctgaaaataaacttgatggtgaaaaactctgtataaattaatttaaaaattatttggtttctctttttaattattctggggcatagtcatttctaaaagtcactagtagaaagtataatttcaagacagaatattctagacatgctagcagtttatatgtattcatgagtaatgtgatatatattgggcgctggtgaggaaggaaggaggaatgagtgactataaggatggttaccatagaaacttccttttttacctaattgaagagagactactacagagtgctaagctgcatgtgtcatcttacactagagagaaatggtaagtttcttgttttatttaagttatgtttaagcaaggaaaggatttgttattgaacagtatatttcaggaaggttagaaagtggcggttaggatatattttaaatctacctaaagcagcatattttaaaaatttaaaagtattggtattaaattaagaaatagaggacagaactagactgatagcagtgacctagaacaatttgagattaggaaagttgtgaccatgaatttaaggatttatgtggatacaaattctcctttaaagtgtttcttcccttaatatttatctgacggtaatttttgagcagtgaattactttatatatcttaatagtttatttgggaccaaacacttaaacaaaaagttctttaagtcatataagccttttcaggaagcttgtctcatattcactcccgagacattcacctgccaagtggcctgaggatcaatccagtcctaggtttattttgcagacttacattctcccaagttattcagcctcatatgactccacggtcggctttaccaaaacagttcagagtgcactttggcacacaattgggaacagaacaatctaatgtgtggtttggtattccaagtggggtctttttcagaatctctgcactagtgtgagatgcaaacatgtttcctcatctttctggcttatccagtatgtagctatttgtgacataataaatatatacatatatgaaaata

SEQ ID NO: 235 - DNA, 3465 bp, Homo sapiens
  source 1..3465: mol_type = other DNA
ggcgacgaccagaaggggcccaagagagggggcgagcgaccgagcgccgcgacgcggaagtgaggtgcgtgcgggctgcagcgcagaccccggcccggcccctccgagagcgtcctgggcgctccctcacgccttgccttcaagccttctgcctttccaccctcgtgagcggagaactgggagtggccattcgacgacaggttagcgggtttgcctcccactcccccagcctcgcgtcgccggctcacagcggcctcctctggggacagtcccccccgggtgccgcctccgcccttcctgtgcgctccttttccttcttctttcctattaaatattatttgggaattgtttaaattttttttttaaaaaaagagagaggcggggaggagtcggagttgtggagaagcagagggactcagggctgagagattaggctgcttctccgggatccgcttttccccgggaaacgcgaggatgctccatggagctgtggtgtaaaggaattcattagccatggatgtattcatgaaaggactttcaaaggccaaggagggagttgtggctgctgctgagaaaaccaaacagggtgtggcagaagcagcaggaaagacaaaagagggtgttctctatgtaggctccaaaaccaaggagggagtggtgcatggtgtggcaacagtggctgagaagaccaaagagcaagtgacaaatgttggaggagcagtggtgacgggtgtgacagcagtagcccagaagacagtggagggagcagggagcattgcagcagccactggctttgtcaaaaaggaccagttgggcaagaatgaagaaggagccccacaggaaggaattctggaagatatgcctgtggatcctgacaatgaggcttatgaaatgccttctgaggaagggtatcaagactacgaacctgaagcctaagaaatatctttgctcccagtttcttgagatctgctgacagatgttccatcctgtacaagtgctcagttccaatgtgcccagtcatgacatttctcaaagtttttacagtgtatctcgaagtcttccatcagcagtgattgaagtatctgtacctgcccccactcagcatttcggtgcttccctttcactgaagtgaatacatggtagcagggtctttgtgtgctgtggattttgtggcttcaatctacgatgttaaaacaaattaaaaacacctaagtgactaccacttatttctaaatcctcactatttttttgttgctgttgttcagaagttgttagtgatttgctatcatatattataagatttttaggtgtcttttaatgatactgtctaagaataatgacgtattgtgaaatttgttaatatatataatacttaaaaatatgtgagcatgaaactatgcacctataaatactaaatatgaaattttaccattttgcgatgtgttttattcacttgtgtttgtatataaatggtgagaattaaaataaaacgttatctcattgcaaaaatattttatttttatcccatctcactttaataataaaaatcatgcttataagcaacatgaattaagaactgacacaaaggacaaaaatataaagttattaatagccatttgaagaaggaggaattttagaagaggtagagaaaatggaacattaaccctacactcggaattccctgaagcaacactgccagaagtgtgttttggtatgcactggttccttaagtggctgtgattaattattgaaagtggggtgttgaagaccccaactactattgtagagtggtctatttctcccttcaatcctgtcaatgtttgctttacgtattttggggaactgttgtttgatgtgtatgtgtttataattgttatacatttttaattgagccttttattaacatatattgttatttttgtctcgaaataattttttagttaaaatctattttgtctgatattggtgtgaatgctgtacctttctgacaataaataatattcgaccatgaataaaaaaaaaaaaaaagtgggttcccgggaactaagcagtgtagaagatgattttgactacaccctccttagagagccataagacacattagcacatattagcacattcaaggctctgagagaatgtggttaactttgtttaactcagcattcctcactttttttttttaatcatcagaaattctctctctctctctctctttttctctcgctctctttttttttttttttttacaggaaatgcctttaaacatcgttggaactaccagagtcaccttaaaggagatcaattctctagactgataaaaatttcatggcctcctttaaatgttgccaaatatatgaattctaggatttttccttaggaaaggtttttctctttcagggaagatctattaactccccatgggtgctgaaaataaacttgatggtgaaaaactctgtataaattaatttaaaaattatttggtttctctttttaattattctggggcatagtcatttctaaaagtcactagtagaaagtataatttcaagacagaatattctagacatgctagcagtttatatgtattcatgagtaatgtgatatatattgggcgctggtgaggaaggaaggaggaatgagtgactataaggatggttaccatagaaacttccttttttacctaattgaagagagactactacagagtgctaagctgcatgtgtcatcttacactagagagaaatggtaagtttcttgttttatttaagttatgtttaagcaaggaaaggatttgttattgaacagtatatttcaggaaggttagaaagtggcggttaggatatattttaaatctacctaaagcagcatattttaaaaatttaaaagtattggtattaaattaagaaatagaggacagaactagactgatagcagtgacctagaacaatttgagattaggaaagttgtgaccatgaatttaaggatttatgtggatacaaattctcctttaaagtgtttcttcccttaatatttatctgacggtaatttttgagcagtgaattactttatatatcttaatagtttatttgggaccaaacacttaaacaaaaagttctttaagtcatataagccttttcaggaagcttgtctcatattcactcccgagacattcacctgccaagtggcctgaggatcaatccagtcctaggtttattttgcagacttacattctcccaagttattcagcctcatatgactccacggtcggctttaccaaaacagttcagagtgcactttggcacacaattgggaacagaacaatctaatgtgtggtttggtattccaagtggggtctttttcagaatctctgcactagtgtgagatgcaaacatgtttcctcatctttctggcttatccagtatgtagctatttgtgacataataaatatatacatatatgaaaata

SEQ ID NO: 236 - DNA, 3091 bp, Homo sapiens
  source 1..3091: mol_type = other DNA
gagtgtgagcggcgcctgctcagggtagatagctgagggcgggggtggatgttggatggattagaaccatcacacttgggcctgctgtttgcctgagtttgaaccacaccccgatgtggtgtaaaggaattcattagccatggatgtattcatgaaaggactttcaaaggccaaggagggagttgtggctgctgctgagaaaaccaaacagggtgtggcagaagcagcaggaaagacaaaagagggtgttctctatgtaggctccaaaaccaaggagggagtggtgcatggtgtggcaacagtggctgagaagaccaaagagcaagtgacaaatgttggaggagcagtggtgacgggtgtgacagcagtagcccagaagacagtggagggagcagggagcattgcagcagccactggctttgtcaaaaaggaccagttgggcaagaatgaagaaggagccccacaggaaggaattctggaagatatgcctgtggatcctgacaatgaggcttatgaaatgccttctgaggaagggtatcaagactacgaacctgaagcctaagaaatatctttgctcccagtttcttgagatctgctgacagatgttccatcctgtacaagtgctcagttccaatgtgcccagtcatgacatttctcaaagtttttacagtgtatctcgaagtcttccatcagcagtgattgaagtatctgtacctgcccccactcagcatttcggtgcttccctttcactgaagtgaatacatggtagcagggtctttgtgtgctgtggattttgtggcttcaatctacgatgttaaaacaaattaaaaacacctaagtgactaccacttatttctaaatcctcactatttttttgttgctgttgttcagaagttgttagtgatttgctatcatatattataagatttttaggtgtcttttaatgatactgtctaagaataatgacgtattgtgaaatttgttaatatatataatacttaaaaatatgtgagcatgaaactatgcacctataaatactaaatatgaaattttaccattttgcgatgtgttttattcacttgtgtttgtatataaatggtgagaattaaaataaaacgttatctcattgcaaaaatattttatttttatcccatctcactttaataataaaaatcatgcttataagcaacatgaattaagaactgacacaaaggacaaaaatataaagttattaatagccatttgaagaaggaggaattttagaagaggtagagaaaatggaacattaaccctacactcggaattccctgaagcaacactgccagaagtgtgttttggtatgcactggttccttaagtggctgtgattaattattgaaagtggggtgttgaagaccccaactactattgtagagtggtctatttctcccttcaatcctgtcaatgtttgctttacgtattttggggaactgttgtttgatgtgtatgtgtttataattgttatacatttttaattgagccttttattaacatatattgttatttttgtctcgaaataattttttagttaaaatctattttgtctgatattggtgtgaatgctgtacctttctgacaataaataatattcgaccatgaataaaaaaaaaaaaaaagtgggttcccgggaactaagcagtgtagaagatgattttgactacaccctccttagagagccataagacacattagcacatattagcacattcaaggctctgagagaatgtggttaactttgtttaactcagcattcctcactttttttttttaatcatcagaaattctctctctctctctctctttttctctcgctctctttttttttttttttttacaggaaatgcctttaaacatcgttggaactaccagagtcaccttaaaggagatcaattctctagactgataaaaatttcatggcctcctttaaatgttgccaaatatatgaattctaggatttttccttaggaaaggtttttctctttcagggaagatctattaactccccatgggtgctgaaaataaacttgatggtgaaaaactctgtataaattaatttaaaaattatttggtttctctttttaattattctggggcatagtcatttctaaaagtcactagtagaaagtataatttcaagacagaatattctagacatgctagcagtttatatgtattcatgagtaatgtgatatatattgggcgctggtgaggaaggaaggaggaatgagtgactataaggatggttaccatagaaacttccttttttacctaattgaagagagactactacagagtgctaagctgcatgtgtcatcttacactagagagaaatggtaagtttcttgttttatttaagttatgtttaagcaaggaaaggatttgttattgaacagtatatttcaggaaggttagaaagtggcggttaggatatattttaaatctacctaaagcagcatattttaaaaatttaaaagtattggtattaaattaagaaatagaggacagaactagactgatagcagtgacctagaacaatttgagattaggaaagttgtgaccatgaatttaaggatttatgtggatacaaattctcctttaaagtgtttcttcccttaatatttatctgacggtaatttttgagcagtgaattactttatatatcttaatagtttatttgggaccaaacacttaaacaaaaagttctttaagtcatataagccttttcaggaagcttgtctcatattcactcccgagacattcacctgccaagtggcctgaggatcaatccagtcctaggtttattttgcagacttacattctcccaagttattcagcctcatatgactccacggtcggctttaccaaaacagttcagagtgcactttggcacacaattgggaacagaacaatctaatgtgtggtttggtattccaagtggggtctttttcagaatctctgcactagtgtgagatgcaaacatgtttcctcatctttctggcttatccagtatgtagctatttgtgacataataaatatatacatatatgaaaata

SEQ ID NO: 237 - DNA, 2984 bp, Homo sapiens
  source 1..2984: mol_type = other DNA
gctctaattctctgcaccttctcaagcattgtgcagattggttttctggattatcagcctgaaggacaaaacgaagaaacagccattagctcctgtctcccattgtctgagagctgccactaggatattaacttcctgaaattctgcagaaatctcctcttactttggcactggagatgcccatacgcagaaagcaaaaaggcacagcatatttaaggaagctcataagaaacagtgcatccagaagtggcgagaattggaggaatggacatgagactctaagaaccagcgcctttgatgttccttttgatctgttatgtagctcttcttgtacacagaatgaagaaggagccccacaggaaggaattctggaagatatgcctgtggatcctgacaatgaggcttatgaaatgccttctgaggaagggtatcaagactacgaacctgaagcctaagaaatatctttgctcccagtttcttgagatctgctgacagatgttccatcctgtacaagtgctcagttccaatgtgcccagtcatgacatttctcaaagtttttacagtgtatctcgaagtcttccatcagcagtgattgaagtatctgtacctgcccccactcagcatttcggtgcttccctttcactgaagtgaatacatggtagcagggtctttgtgtgctgtggattttgtggcttcaatctacgatgttaaaacaaattaaaaacacctaagtgactaccacttatttctaaatcctcactatttttttgttgctgttgttcagaagttgttagtgatttgctatcatatattataagatttttaggtgtcttttaatgatactgtctaagaataatgacgtattgtgaaatttgttaatatatataatacttaaaaatatgtgagcatgaaactatgcacctataaatactaaatatgaaattttaccattttgcgatgtgttttattcacttgtgtttgtatataaatggtgagaattaaaataaaacgttatctcattgcaaaaatattttatttttatcccatctcactttaataataaaaatcatgcttataagcaacatgaattaagaactgacacaaaggacaaaaatataaagttattaatagccatttgaagaaggaggaattttagaagaggtagagaaaatggaacattaaccctacactcggaattccctgaagcaacactgccagaagtgtgttttggtatgcactggttccttaagtggctgtgattaattattgaaagtggggtgttgaagaccccaactactattgtagagtggtctatttctcccttcaatcctgtcaatgtttgctttacgtattttggggaactgttgtttgatgtgtatgtgtttataattgttatacatttttaattgagccttttattaacatatattgttatttttgtctcgaaataattttttagttaaaatctattttgtctgatattggtgtgaatgctgtacctttctgacaataaataatattcgaccatgaataaaaaaaaaaaaaaagtgggttcccgggaactaagcagtgtagaagatgattttgactacaccctccttagagagccataagacacattagcacatattagcacattcaaggctctgagagaatgtggttaactttgtttaactcagcattcctcactttttttttttaatcatcagaaattctctctctctctctctctttttctctcgctctctttttttttttttttttacaggaaatgcctttaaacatcgttggaactaccagagtcaccttaaaggagatcaattctctagactgataaaaatttcatggcctcctttaaatgttgccaaatatatgaattctaggatttttccttaggaaaggtttttctctttcagggaagatctattaactccccatgggtgctgaaaataaacttgatggtgaaaaactctgtataaattaatttaaaaattatttggtttctctttttaattattctggggcatagtcatttctaaaagtcactagtagaaagtataatttcaagacagaatattctagacatgctagcagtttatatgtattcatgagtaatgtgatatatattgggcgctggtgaggaaggaaggaggaatgagtgactataaggatggttaccatagaaacttccttttttacctaattgaagagagactactacagagtgctaagctgcatgtgtcatcttacactagagagaaatggtaagtttcttgttttatttaagttatgtttaagcaaggaaaggatttgttattgaacagtatatttcaggaaggttagaaagtggcggttaggatatattttaaatctacctaaagcagcatattttaaaaatttaaaagtattggtattaaattaagaaatagaggacagaactagactgatagcagtgacctagaacaatttgagattaggaaagttgtgaccatgaatttaaggatttatgtggatacaaattctcctttaaagtgtttcttcccttaatatttatctgacggtaatttttgagcagtgaattactttatatatcttaatagtttatttgggaccaaacacttaaacaaaaagttctttaagtcatataagccttttcaggaagcttgtctcatattcactcccgagacattcacctgccaagtggcctgaggatcaatccagtcctaggtttattttgcagacttacattctcccaagttattcagcctcatatgactccacggtcggctttaccaaaacagttcagagtgcactttggcacacaattgggaacagaacaatctaatgtgtggtttggtattccaagtggggtctttttcagaatctctgcactagtgtgagatgcaaacatgtttcctcatctttctggcttatccagtatgtagctatttgtgacataataaatatatacatatatgaaaata

SEQ ID NO: 238 - DNA, 927 bp, Homo sapiens
  source 1..927: mol_type = other DNA
gacaaatcagcggtgggggcggagagccgaggagaaggagaaggaggaggactaggaggaggaggacggcgacgaccagaaggggcccaagagagggggcgagcgaccgagcgccgcgacgcggaagtgaggtgcgtgcgggctgcagcgcagaccccggcccggcccctccgagagcgtcctgggcgctccctcacgccttgccttcaagccttctgcctttccaccctcgtgagcggagaactgggagtggccattcgacgacagtgtggtgtaaaggaattcattagccatggatgtattcatgaaaggactttcaaaggccaaggagggagttgtggctgctgctgagaaaaccaaacagggtgtggcagaagcagcaggaaagacaaaagagggtgttctctatgtaggctccaaaaccaaggagggagtggtgcatggtgtggcaacagtggctgagaagaccaaagagcaagtgacaaatgttggaggagcagtggtgacgggtgtgacagcagtagcccagaagacagtggagggagcagggagcattgcagcagccactggctttgtcaaaaaggaccagttgggcaagaagcatccaaaatacaaaccatctaagaggcaagaaaatgtcgtgatgttcctagtgcaagttaaaaagatttgctttcctcaagtcggaaagcccttctcatttttgaggtttttttcttcttttttttttcaagtgaaagcattttggaggagtcaatatccatctttaaaggtagccaggtcacatgtatacatatgtaactaacctgcacaatgtgcacatgtaccctaaaacttaaagtataatttaaaaaaaaagaatttaaataaaaaaagaaaatcagagagaaaaaaaaaaagatgcatgtgcaccctgatactaccatc

SEQ ID NO: 239 - DNA, 906 bp, Homo sapiens
  source 1..906: mol_type = other DNA
gaactgggagtggccattcgacgacaggttagcgggtttgcctcccactcccccagcctcgcgtcgccggctcacagcggcctcctctggggacagtcccccccgggtgccgcctccgcccttcctgtgcgctccttttccttcttctttcctattaaatattatttgggaattgtttaaattttttttttaaaaaaagagagaggcggggaggagtcggagttgtggagaagcagagggactcagtgtggtgtaaaggaattcattagccatggatgtattcatgaaaggactttcaaaggccaaggagggagttgtggctgctgctgagaaaaccaaacagggtgtggcagaagcagcaggaaagacaaaagagggtgttctctatgtaggctccaaaaccaaggagggagtggtgcatggtgtggcaacagtggctgagaagaccaaagagcaagtgacaaatgttggaggagcagtggtgacgggtgtgacagcagtagcccagaagacagtggagggagcagggagcattgcagcagccactggctttgtcaaaaaggaccagttgggcaagaagcatccaaaatacaaaccatctaagaggcaagaaaatgtcgtgatgttcctagtgcaagttaaaaagatttgctttcctcaagtcggaaagcccttctcatttttgaggtttttttcttcttttttttttcaagtgaaagcattttggaggagtcaatatccatctttaaaggtagccaggtcacatgtatacatatgtaactaacctgcacaatgtgcacatgtaccctaaaacttaaagtataatttaaaaaaaaagaatttaaataaaaaaagaaaatcagagagaaaaaaaaaaagatgcatgtgcaccctgatactaccatc

SEQ ID NO: 240 - DNA, 733 bp, Homo sapiens
  source 1..733: mol_type = other DNA
tctgctagtgggaggagcttgcttctccattctggtgtgatccaggaacagctgtcttccagctctgaaagagtgtggtgtaaaggaattcattagccatggatgtattcatgaaaggactttcaaaggccaaggagggagttgtggctgctgctgagaaaaccaaacagggtgtggcagaagcagcaggaaagacaaaagagggtgttctctatgtaggctccaaaaccaaggagggagtggtgcatggtgtggcaacagtggctgagaagaccaaagagcaagtgacaaatgttggaggagcagtggtgacgggtgtgacagcagtagcccagaagacagtggagggagcagggagcattgcagcagccactggctttgtcaaaaaggaccagttgggcaagaagcatccaaaatacaaaccatctaagaggcaagaaaatgtcgtgatgttcctagtgcaagttaaaaagatttgctttcctcaagtcggaaagcccttctcatttttgaggtttttttcttcttttttttttcaagtgaaagcattttggaggagtcaatatccatctttaaaggtagccaggtcacatgtatacatatgtaactaacctgcacaatgtgcacatgtaccctaaaacttaaagtataatttaaaaaaaaagaatttaaataaaaaaagaaaatcagagagaaaaaaaaaaagatgcatgtgcaccctgatactaccatc

SEQ ID NO: 241 - DNA, 755 bp, Homo sapiens
  source 1..755: mol_type = other DNA
ggagaaggaggaggactaggaggaggaggacggcgacgaccagaaggggcccaagagagggggcgagcgaccgagcgccgcgacgcggaagtgagtgtggtgtaaaggaattcattagccatggatgtattcatgaaaggactttcaaaggccaaggagggagttgtggctgctgctgagaaaaccaaacagggtgtggcagaagcagcaggaaagacaaaagagggtgttctctatgtaggctccaaaaccaaggagggagtggtgcatggtgtggcaacagtggctgagaagaccaaagagcaagtgacaaatgttggaggagcagtggtgacgggtgtgacagcagtagcccagaagacagtggagggagcagggagcattgcagcagccactggctttgtcaaaaaggaccagttgggcaagaagcatccaaaatacaaaccatctaagaggcaagaaaatgtcgtgatgttcctagtgcaagttaaaaagatttgctttcctcaagtcggaaagcccttctcatttttgaggtttttttcttcttttttttttcaagtgaaagcattttggaggagtcaatatccatctttaaaggtagccaggtcacatgtatacatatgtaactaacctgcacaatgtgcacatgtaccctaaaacttaaagtataatttaaaaaaaaagaatttaaataaaaaaagaaaatcagagagaaaaaaaaaaagatgcatgtgcaccctgatactaccatc

SEQ ID NO: 242 - DNA, 742 bp, Homo sapiens
  source 1..742: mol_type = other DNA
ctgagggcgggggtggatgttggatggattagaaccatcacacttgggcctgctgtttgcctgagtttgaaccacaccccgatgtggtgtaaaggaattcattagccatggatgtattcatgaaaggactttcaaaggccaaggagggagttgtggctgctgctgagaaaaccaaacagggtgtggcagaagcagcaggaaagacaaaagagggtgttctctatgtaggctccaaaaccaaggagggagtggtgcatggtgtggcaacagtggctgagaagaccaaagagcaagtgacaaatgttggaggagcagtggtgacgggtgtgacagcagtagcccagaagacagtggagggagcagggagcattgcagcagccactggctttgtcaaaaaggaccagttgggcaagaagcatccaaaatacaaaccatctaagaggcaagaaaatgtcgtgatgttcctagtgcaagttaaaaagatttgctttcctcaagtcggaaagcccttctcatttttgaggtttttttcttcttttttttttcaagtgaaagcattttggaggagtcaatatccatctttaaaggtagccaggtcacatgtatacatatgtaactaacctgcacaatgtgcacatgtaccctaaaacttaaagtataatttaaaaaaaaagaatttaaataaaaaaagaaaatcagagagaaaaaaaaaaagatgcatgtgcaccctgatactaccatc

SEQ ID NO: 243 - DNA, 1690 bp, Homo sapiens
  source 1..1690: mol_type = other DNA
ggggagcctaaggaaagagacttgacctggctttcgtcctgcttctgatattcccttctccacaagggctgagagattaggctgcttctccgggatccgcttttccccgggaaacgcgaggatgctccatggagctgtggtgtaaaggaattcattagccatggatgtattcatgaaaggactttcaaaggccaaggagggagttgtggctgctgctgagaaaaccaaacagggtgtggcagaagcagcaggaaagacaaaagagggtgttctctatgtaggctccaaaaccaaggagggagtggtgcatggtgtggcaacagtggctgagaagaccaaagagcaagtgacaaatgttggaggagcagtggtgacgggtgtgacagcagtagcccagaagacagtggagggagcagggagcattgcagcagccactggctttgtcaaaaaggaccagttgggcaagaatgaagaaggagccccacaggaaggaattctggaagatatgcctgtggatcctgacaatgaggcttatgaaatgccttctgaggaagggtatcaagactacgaacctgaagcctaagaaatatctttgctcccagtttcttgagatctgctgacagatgttccatcctgtacaagtgctcagttccaatgtgcccagtcatgacatttctcaaagtttttacagtgtatctcgaagtcttccatcagcagtgattgaagtatctgtacctgcccccactcagcatttcggtgcttccctttcactgaagtgaatacatggtagcagggtctttgtgtgctgtggattttgtggcttcaatctacgatgttaaaacaaattaaaaacacctaagtgactaccacttatttctaaatcctcactatttttttgttgctgttgttcagaagttgttagtgatttgctatcatatattataagatttttaggtgtcttttaatgatactgtctaagaataatgacgtattgtgaaatttgttaatatatataatacttaaaaatatgtgagcatgaaactatgcacctataaatactaaatatgaaattttaccattttgcgatgtgttttattcacttgtgtttgtatataaatggtgagaattaaaataaaacgttatctcattgcaaaaatattttatttttatcccatctcactttaataataaaaatcatgcttataagcaacatgaattaagaactgacacaaaggacaaaaatataaagttattaatagccatttgaagaaggaggaattttagaagaggtagagaaaatggaacattaaccctacactcggaattccctgaagcaacactgccagaagtgtgttttggtatgcactggttccttaagtggctgtgattaattattgaaagtggggtgttgaagaccccaactactattgtagagtggtctatttctcccttcaatcctgtcaatgtttgctttacgtattttggggaactgttgtttgatgtgtatgtgtttataattgttatacatttttaattgagccttttattaacatatattgttatttttgtctcgaaataattttttagttaaaatctattttgtctgatattggtgtgaatgctgtacctttctgacaataaataatattcgaccatgaataaaaaaaaaaaaaaagtgggttcccgggaa

SEQ ID NO: 244 - protein, 6 aa, synthetic construct
KXKEGV

SEQ ID NO: 245 - RNA, 21 nt, synthetic construct
  source 1..21: mol_type = other RNA
  modified_base 1: mod_base = OTHER; note = 2'-O-methyluridine-3'-phosphorothioate
  modified_base 2: mod_base = OTHER; note = 2'-O-methylcytidine-3'-phosphorothioate
  modified_base 3: mod_base = OTHER; note = 2'-O-methylcytidine-3'-phosphate
  modified_base 4: mod_base = OTHER; note = 2'-O-methylcytidine-3'-phosphate
  modified_base 5: mod_base = OTHER; note = 2'-O-methyladenosine-3'-phosphate
  modified_base 6: mod_base = OTHER; note = 2'-O-hexadecyl-guanosine-3'-phosphate
  modified_base 7: mod_base = OTHER; note = 2'-O-methyluridine-3'-phosphate
  modified_base 8: mod_base = OTHER; note = 2'-O-methyluridine-3'-phosphate
  modified_base 9: mod_base = OTHER; note = 2'-deoxy-2'-fluorouridine-3'-phosphate
  modified_base 10: mod_base = OTHER; note = 2'-deoxy-2'-fluorocytidine-3'-phosphate
  modified_base 11: mod_base = OTHER; note = 2'-deoxy-2'-fluorouridine-3'-phosphate
  modified_base 12: mod_base = OTHER; note = 2'-O-methyluridine-3'-phosphate
  modified_base 13: mod_base = OTHER; note = 2'-O-methylguanosine-3'-phosphate
  modified_base 14: mod_base = OTHER; note = 2'-O-methyladenosine-3'-phosphate
  modified_base 15: mod_base = OTHER; note = 2'-O-methylguanosine-3'-phosphate
  modified_base 16: mod_base = OTHER; note = 2'-O-methyladenosine-3'-phosphate
  modified_base 17: mod_base = OTHER; note = 2'-O-methyluridine-3'-phosphate
  modified_base 18: mod_base = OTHER; note = 2'-O-methylcytidine-3'-phosphate
  modified_base 19: mod_base = OTHER; note = 2'-O-methyluridine-3'-phosphate
  modified_base 20: mod_base = OTHER; note = 2'-O-methylguanosine-3'-phosphate
  modified_base 21: mod_base = OTHER; note = 2'-O-methyladenosine-3'-phosphate ((2S,4R)-1-[29-[[2-(acetylamino)-2-deoxy-beta-D-galactopyra nosyl]oxy]-14,14-bis[[3-[[3-[[5-[[2-(acetylamino)-2-deoxy-b eta-D-galactopyranosyl]oxy]-1-oxopentyl]amino]propyl]amino] -3-oxopropoxy]methyl]-1,12,19,25-tetraoxo-16-oxa-13,20,24-t riazanonacos-1-yl]-4-hydroxy-2-pyrrolidinyl)methyl ester
tcccagtttcttgagatctga

SEQ ID NO: 246 - DNA, 23 bp, synthetic construct
  source 1..23: mol_type = other DNA
  modified_base 1: mod_base = OTHER; note = 2'-O-methyluridine-3'-phosphorothioate 5'-(E)-Vinylphosphonate
  modified_base 2: mod_base = OTHER; note = 2'-deoxycytidine-3'-phosphorothioate
  modified_base 3: mod_base = OTHER; note = 2'-O-methyladenosine-3'-phosphate
  modified_base 4: mod_base = OTHER; note = 2'-O-methylguanosine-3'-phosphate
  modified_base 6: mod_base = OTHER; note = 2'-O-methyluridine-3'-phosphate
  modified_base 8: mod_base = OTHER; note = 2'-O-methyluridine-3'-phosphate
  modified_base 9: mod_base = OTHER; note = 2'-O-methylcytidine-3'-phosphate
  modified_base 10: mod_base = OTHER; note = 2'-O-methyladenosine-3'-phosphate
  modified_base 11: mod_base = OTHER; note = 2'-O-methyladenosine-3'-phosphate
  modified_base 13: mod_base = OTHER; note = 2'-O-methyladenosine-3'-phosphate
  modified_base 14: mod_base = OTHER; note = 2'-deoxy-2'-fluoroadenosine-3'-phosphate
  modified_base 15: mod_base = OTHER; note = 2'-O-methyladenosine-3'-phosphate
  modified_base 16: mod_base = OTHER; note = 2'-O-methylcytidine-3'-phosphate
  modified_base 17: mod_base = OTHER; note = 2'-O-methyluridine-3'-phosphate
  modified_base 18: mod_base = OTHER; note = 2'-O-methylguanosine-3'-phosphate
  modified_base 19: mod_base = OTHER; note = 2'-O-methylguanosine-3'-phosphate
  modified_base 20: mod_base = OTHER; note = 2'-O-methylguanosine-3'-phosphate
  modified_base 21: mod_base = OTHER; note = 2'-O-methyladenosine-3'-phosphorothioate
  modified_base 22: mod_base = OTHER; note = 2'-O-methylguanosine-3'-phosphorothioate
  modified_base 23: mod_base = OTHER; note = 2'-O-methylcytidine
  misc_feature 1: note = RNA
  misc_feature 3..4: note = RNA
  misc_feature 6: note = RNA
  misc_feature 8..11: note = RNA
  misc_feature 13..23: note = RNA
  misc_feature 2: note = DNA
  misc_feature 5: note = DNA
  misc_feature 7: note = DNA
  misc_feature 12: note = DNA
tcagatctcaagaaactgggagc

SEQ ID NO: 247 - RNA, 21 nt, synthetic construct
  source 1..21: mol_type = other RNA
  modified_base 1: mod_base = OTHER; note = 2'-O-methyladenosine-3'-phosphorothioate
  modified_base 2: mod_base = OTHER; note = 2'-O-methyladenosine-3'-phosphorothioate
  modified_base 3: mod_base = OTHER; note = 2'-O-methylguanosine-3'-phosphate
  modified_base 4: mod_base = OTHER; note = 2'-O-methyluridine-3'-phosphate
  modified_base 5: mod_base = OTHER; note = 2'-O-methylguanosine-3'-phosphate
  modified_base 6: mod_base = OTHER; note = 2'-O-hexadecyl-cytidine-3'-phosphate
  modified_base 7: mod_base = OTHER; note = 2'-O-methyluridine-3'-phosphate
  modified_base 8: mod_base = OTHER; note = 2'-O-methylcytidine-3'-phosphate
  modified_base 9: mod_base = OTHER; note = 2'-deoxy-2'-fluoroadenosine-3'-phosphate
  modified_base 10: mod_base = OTHER; note = 2'-deoxy-2'-fluoroguanosine-3'-phosphate
  modified_base 11: mod_base = OTHER; note = 2'-deoxy-2'-fluorouridine-3'-phosphate
  modified_base 12: mod_base = OTHER; note = 2'-O-methyluridine-3'-phosphate
  modified_base 13: mod_base = OTHER; note = 2'-O-methylcytidine-3'-phosphate
  modified_base 14: mod_base = OTHER; note = 2'-O-methylcytidine-3'-phosphate
  modified_base 15: mod_base = OTHER; note = 2'-O-methyladenosine-3'-phosphate
  modified_base 16: mod_base = OTHER; note = 2'-O-methyladenosine-3'-phosphate
  modified_base 17: mod_base = OTHER; note = 2'-O-methyluridine-3'-phosphate
  modified_base 18: mod_base = OTHER; note = 2'-O-methylguanosine-3'-phosphate
  modified_base 19: mod_base = OTHER; note = 2'-O-methyluridine-3'-phosphate
  modified_base 20: mod_base = OTHER; note = 2'-O-methylguanosine-3'-phosphate
  modified_base 21: mod_base = OTHER; note = 2'-O-methyladenosine-3'-phosphate ((2S,4R)-1-[29-[[2-(acetylamino)-2-deoxy-beta-D-galactopyra nosyl]oxy]-14,14-bis[[3-[[3-[[5-[[2-(acetylamino)-2-deoxy-b eta-D-galactopyranosyl]oxy]-1-oxopentyl]amino]propyl]amino] -3-oxopropoxy]methyl]-1,12,19,25-tetraoxo-16-oxa-13,20,24-t riazanonacos-1-yl]-4-hydroxy-2-pyrrolidinyl)methyl ester
aagtgctcagttccaatgtga

SEQ ID NO: 248 - DNA, 23 bp, synthetic construct
  source 1..23: mol_type = other DNA
  modified_base 1: mod_base = OTHER; note = 2'-O-methyluridine-3'-phosphorothioate 5'-(E)-Vinylphosphonate
  modified_base 2: mod_base = OTHER; note = 2'-deoxycytidine-3'-phosphorothioate
  modified_base 3: mod_base = OTHER; note = 2'-O-methyladenosine-3'-phosphate
  modified_base 4: mod_base = OTHER; note = 2'-O-methylcytidine-3'-phosphate
  modified_base 6: mod_base = OTHER; note = 2'-O-methyluridine-3'-phosphate
  modified_base 8: mod_base = OTHER; note = 2'-O-methylguanosine-3'-phosphate
  modified_base 9: mod_base = OTHER; note = 2'-O-methylguanosine-3'-phosphate
  modified_base 10: mod_base = OTHER; note = 2'-O-methyladenosine-3'-phosphate
  modified_base 11: mod_base = OTHER; note = 2'-O-methyladenosine-3'-phosphate
  modified_base 13: mod_base = OTHER; note = 2'-O-methyluridine-3'-phosphate
  modified_base 14: mod_base = OTHER; note = 2'-deoxy-2'-fluoroguanosine-3'-phosphate
  modified_base 15: mod_base = OTHER; note = 2'-O-methyladenosine-3'-phosphate
  modified_base 16: mod_base = OTHER; note = 2'-O-methylguanosine-3'-phosphate
  modified_base 17: mod_base = OTHER; note = 2'-O-methylcytidine-3'-phosphate
  modified_base 18: mod_base = OTHER; note = 2'-O-methyladenosine-3'-phosphate
  modified_base 19: mod_base = OTHER; note = 2'-O-methylcytidine-3'-phosphate
  modified_base 20: mod_base = OTHER; note = 2'-O-methyluridine-3'-phosphate
  modified_base 21: mod_base = OTHER; note = 2'-O-methyluridine-3'-phosphorothioate
  modified_base 22: mod_base = OTHER; note = 2'-O-methylguanosine-3'-phosphorothioate
  modified_base 23: mod_base = OTHER; note = 2'-O-methyluridine
  misc_feature 1: note = RNA
  misc_feature 3..4: note = RNA
  misc_feature 6: note = RNA
  misc_feature 8..11: note = RNA
  misc_feature 13..23: note = RNA
  misc_feature 2: note = DNA
  misc_feature 5: note = DNA
  misc_feature 7: note = DNA
  misc_feature 12: note = DNA
tcacattggaactgagcacttgt

SEQ ID NO: 249 - RNA, 21 nt, synthetic construct
  source 1..21: mol_type = other RNA
  modified_base 1: mod_base = OTHER; note = 2'-O-methyluridine-3'-phosphorothioate
  modified_base 2: mod_base = OTHER; note = 2'-O-methylcytidine-3'-phosphorothioate
  modified_base 3: mod_base = OTHER; note = 2'-O-methyluridine-3'-phosphate
  modified_base 4: mod_base = OTHER; note = 2'-O-methyluridine-3'-phosphate
  modified_base 5: mod_base = OTHER; note = 2'-O-methyluridine-3'-phosphate
  modified_base 6: mod_base = OTHER; note = 2'-O-methylguanosine-3'-phosphate
  modified_base 7: mod_base = OTHER; note = 2'-O-methylcytidine-3'-phosphate
  modified_base 8: mod_base = OTHER; note = 2'-O-methyluridine-3'-phosphate
  modified_base 9: mod_base = OTHER; note = 2'-deoxy-2'-fluorocytidine-3'-phosphate
  modified_base 10: mod_base = OTHER; note = 2'-deoxy-2'-fluorocytidine-3'-phosphate
  modified_base 11: mod_base = OTHER; note = 2'-deoxy-2'-fluorocytidine-3'-phosphate
  modified_base 12: mod_base = OTHER; note = 2'-O-methyladenosine-3'-phosphate
  modified_base 13: mod_base = OTHER; note = 2'-O-methylguanosine-3'-phosphate
  modified_base 14: mod_base = OTHER; note = 2'-O-methyluridine-3'-phosphate
  modified_base 15: mod_base = OTHER; note = 2'-O-methyluridine-3'-phosphate
  modified_base 16: mod_base = OTHER; note = 2'-O-hexadecyl-uridine-3'-phosphate
  modified_base 17: mod_base = OTHER; note = 2'-O-methylcytidine-3'-phosphate
  modified_base 18: mod_base = OTHER; note = 2'-O-methyluridine-3'-phosphate
  modified_base 19: mod_base = OTHER; note = 2'-O-methyluridine-3'-phosphate
  modified_base 20: mod_base = OTHER; note = 2'-O-methylguanosine-3'-phosphate
  modified_base 21: mod_base = OTHER; note = 2'-O-methyladenosine-3'-phosphate ((2S,4R)-1-[29-[[2-(acetylamino)-2-deoxy-beta-D-galactopyra nosyl]oxy]-14,14-bis[[3-[[3-[[5-[[2-(acetylamino)-2-deoxy-b eta-D-galactopyranosyl]oxy]-1-oxopentyl]amino]propyl]amino] -3-oxopropoxy]methyl]-1,12,19,25-tetraoxo-16-oxa-13,20,24-t riazanonacos-1-yl]-4-hydroxy-2-pyrrolidinyl)methyl ester
tctttgctcccagtttcttga

SEQ ID NO: 250 - DNA, 23 bp, synthetic construct
  source 1..23: mol_type = other DNA
  modified_base 1: mod_base = OTHER; note = 2'-O-methyluridine-3'-phosphorothioate 5'-(E)-Vinylphosphonate
  modified_base 2: mod_base = OTHER; note = 2'-deoxycytidine-3'-phosphorothioate
  modified_base 3: mod_base = OTHER; note = 2'-O-methyladenosine-3'-phosphate
  modified_base 4: mod_base = OTHER; note = 2'-O-methyladenosine-3'-phosphate
  modified_base 6: mod_base = OTHER; note = 2'-O-methyladenosine-3'-phosphate
  modified_base 8: mod_base = OTHER; note = 2'-O-methyladenosine-3'-phosphate
  modified_base 9: mod_base = OTHER; note = 2'-O-methylcytidine-3'-phosphate
  modified_base 10: mod_base = OTHER; note = 2'-O-methyluridine-3'-phosphate
  modified_base 11: mod_base = OTHER; note = 2'-O-methylguanosine-3'-phosphate
  modified_base 13: mod_base = OTHER; note = 2'-O-methylguanosine-3'-phosphate
  modified_base 14: mod_base = OTHER; note = 2'-deoxy-2'-fluoroadenosine-3'-phosphate
  modified_base 15: mod_base = OTHER; note = 2'-O-methylguanosine-3'-phosphate
  modified_base 16: mod_base = OTHER; note = 2'-O-methylcytidine-3'-phosphate
  modified_base 17: mod_base = OTHER; note = 2'-O-methyladenosine-3'-phosphate
  modified_base 18: mod_base = OTHER; note = 2'-O-methyladenosine-3'-phosphate
  modified_base 19: mod_base = OTHER; note = 2'-O-methyladenosine-3'-phosphate
  modified_base 20: mod_base = OTHER; note = 2'-O-methylguanosine-3'-phosphate
  modified_base 21: mod_base = OTHER; note = 2'-O-methyladenosine-3'-phosphorothioate
  modified_base 22: mod_base = OTHER; note = 2'-O-methyluridine-3'-phosphorothioate
  modified_base 23: mod_base = OTHER; note = 2'-O-methyladenosine
  misc_feature 1: note = RNA
  misc_feature 3..4: note = RNA
  misc_feature 6: note = RNA
  misc_feature 8..11: note = RNA
  misc_feature 13..23: note = RNA
  misc_feature 2: note = DNA
  misc_feature 5: note = DNA
  misc_feature 7: note = DNA
  misc_feature 12: note = DNA
tcaagaaactgggagcaaagata

SEQ ID NO: 251 - RNA, 21 nt, synthetic construct
  source 1..21: mol_type = other RNA
  modified_base 1: mod_base = OTHER; note = 2'-O-methylguanosine-3'-phosphorothioate
  modified_base 2: mod_base = OTHER; note = 2'-O-methyluridine-3'-phosphorothioate
  modified_base 3: mod_base = OTHER; note = 2'-O-methyladenosine-3'-phosphate
  modified_base 4: mod_base = OTHER; note = 2'-O-methylcytidine-3'-phosphate
  modified_base 5: mod_base = OTHER; note = 2'-O-methyladenosine-3'-phosphate
  modified_base 6: mod_base = OTHER; note = 2'-O-hexadecyl-adenosine-3'-phosphate
  modified_base 7: mod_base = OTHER; note = 2'-deoxy-2'-fluoroguanosine-3'-phosphate
  modified_base 8: mod_base = OTHER; note = 2'-O-methyluridine-3'-phosphate
  modified_base 9: mod_base = OTHER; note = 2'-deoxy-2'-fluoroguanosine-3'-phosphate
  modified_base 10: mod_base = OTHER; note = 2'-deoxy-2'-fluorocytidine-3'-phosphate
  modified_base 11: mod_base = OTHER; note = 2'-deoxy-2'-fluorouridine-3'-phosphate
  modified_base 12: mod_base = OTHER; note = 2'-O-methylcytidine-3'-phosphate
  modified_base 13: mod_base = OTHER; note = 2'-O-methyladenosine-3'-phosphate
  modified_base 14: mod_base = OTHER; note = 2'-O-methylguanosine-3'-phosphate
  modified_base 15: mod_base = OTHER; note = 2'-O-methyluridine-3'-phosphate
  modified_base 16: mod_base = OTHER; note = 2'-O-methyluridine-3'-phosphate
  modified_base 17: mod_base = OTHER; note = 2'-O-methylcytidine-3'-phosphate
  modified_base 18: mod_base = OTHER; note = 2'-O-methylcytidine-3'-phosphate
  modified_base 19: mod_base = OTHER; note = 2'-O-methyladenosine-3'-phosphate
  modified_base 20: mod_base = OTHER; note = 2'-O-methyladenosine-3'-phosphate
  modified_base 21: mod_base = OTHER; note = 2'-O-methyladenosine-3'-phosphate ((2S,4R)-1-[29-[[2-(acetylamino)-2-deoxy-beta-D-galactopyra nosyl]oxy]-14,14-bis[[3-[[3-[[5-[[2-(acetylamino)-2-deoxy-b eta-D-galactopyranosyl]oxy]-1-oxopentyl]amino]propyl]amino] -3-oxopropoxy]methyl]-1,12,19,25-tetraoxo-16-oxa-13,20,24-t riazanonacos-1-yl]-4-hydroxy-2-pyrrolidinyl)methyl ester
gtacaagtgctcagttccaaa

SEQ ID NO: 252 - DNA, 23 bp, synthetic construct
  source 1..23: mol_type = other DNA
  modified_base 1: mod_base = OTHER; note = 2'-O-methyluridine-3'-phosphorothioate 5'-(E)-Vinylphosphonate
  modified_base 2: mod_base = OTHER; note = 2'-deoxy-2'-fluorouridine-3'-phosphorothioate
  modified_base 3: mod_base = OTHER; note = 2'-O-methyluridine-3'-phosphate
  modified_base 4: mod_base = OTHER; note = 2'-O-methylguanosine-3'-phosphate
  modified_base 6: mod_base = OTHER; note = 2'-O-methyladenosine-3'-phosphate
  modified_base 7: mod_base = OTHER; note = Adenosine-glycol nucleic acid (GNA), S-isomer
  modified_base 8: mod_base = OTHER; note = 2'-O-methylcytidine-3'-phosphate
  modified_base 9: mod_base = OTHER; note = 2'-O-methyluridine-3'-phosphate
  modified_base 10: mod_base = OTHER; note = 2'-O-methylguanosine-3'-phosphate
  modified_base 11: mod_base = OTHER; note = 2'-O-methyladenosine-3'-phosphate
  modified_base 12: mod_base = OTHER; note = 2'-O-methylguanosine-3'-phosphate
  modified_base 13: mod_base = OTHER; note = 2'-O-methylcytidine-3'-phosphate
  modified_base 14: mod_base = OTHER; note = 2'-deoxy-2'-fluoroadenosine-3'-phosphate
  modified_base 15: mod_base = OTHER; note = 2'-O-methylcytidine-3'-phosphate
  modified_base 16: mod_base = OTHER; note = 2'-deoxy-2'-fluorouridine-3'-phosphate
  modified_base 17: mod_base = OTHER; note = 2'-O-methyluridine-3'-phosphate
  modified_base 18: mod_base = OTHER; note = 2'-O-methylguanosine-3'-phosphate
  modified_base 19: mod_base = OTHER; note = 2'-O-methyluridine-3'-phosphate
  modified_base 20: mod_base = OTHER; note = 2'-O-methyladenosine-3'-phosphate
  modified_base 21: mod_base = OTHER; note = 2'-O-methylcytidine-3'-phosphorothioate
  modified_base 22: mod_base = OTHER; note = 2'-O-methyladenosine-3'-phosphorothioate
  modified_base 23: mod_base = OTHER; note = 2'-O-methylguanosine
  misc_feature 1..4: note = RNA
  misc_feature 6..23: note = RNA
  misc_feature 5: note = DNA
tttggaactgagcacttgtacag

SEQ ID NO: 253 - RNA, 21 nt, synthetic construct
  source 1..21: mol_type = other RNA
  modified_base 1: mod_base = OTHER; note = 2'-O-methylcytidine-3'-phosphorothioate
  modified_base 2: mod_base = OTHER; note = 2'-O-methylcytidine-3'-phosphorothioate
  modified_base 3: mod_base = OTHER; note = 2'-O-methyladenosine-3'-phosphate
  modified_base 4: mod_base = OTHER; note = 2'-O-methyluridine-3'-phosphate
  modified_base 5: mod_base = OTHER; note = 2'-O-methylcytidine-3'-phosphate
  modified_base 6: mod_base = OTHER; note = 2'-O-hexadecyl-adenosine-3'-phosphate
  modified_base 7: mod_base = OTHER; note = 2'-O-methylguanosine-3'-phosphate
  modified_base 8: mod_base = OTHER; note = 2'-O-methylcytidine-3'-phosphate
  modified_base 9: mod_base = OTHER; note = 2'-deoxy-2'-fluoroadenosine-3'-phosphate
  modified_base 10: mod_base = OTHER; note = 2'-deoxy-2'-fluoroguanosine-3'-phosphate
  modified_base 11: mod_base = OTHER; note = 2'-deoxy-2'-fluorouridine-3'-phosphate
  modified_base 12: mod_base = OTHER; note = 2'-O-methylguanosine-3'-phosphate
  modified_base 13: mod_base = OTHER; note = 2'-O-methyladenosine-3'-phosphate
  modified_base 14: mod_base = OTHER; note = 2'-O-methyluridine-3'-phosphate
  modified_base 15: mod_base = OTHER; note = 2'-O-methyluridine-3'-phosphate
  modified_base 16: mod_base = OTHER; note = 2'-O-methylguanosine-3'-phosphate
  modified_base 17: mod_base = OTHER; note = 2'-O-methyladenosine-3'-phosphate
  modified_base 18: mod_base = OTHER; note = 2'-O-methyladenosine-3'-phosphate
  modified_base 19: mod_base = OTHER; note = 2'-O-methylguanosine-3'-phosphate
  modified_base 20: mod_base = OTHER; note = 2'-O-methyluridine-3'-phosphate
  modified_base 21: mod_base = OTHER; note = 2'-O-methyladenosine-3'-phosphate ((2S,4R)-1-[29-[[2-(acetylamino)-2-deoxy-beta-D-galactopyra nosyl]oxy]-14,14-bis[[3-[[3-[[5-[[2-(acetylamino)-2-deoxy-b eta-D-galactopyranosyl]oxy]-1-oxopentyl]amino]propyl]amino] -3-oxopropoxy]methyl]-1,12,19,25-tetraoxo-16-oxa-13,20,24-t riazanonacos-1-yl]-4-hydroxy-2-pyrrolidinyl)methyl ester
ccatcagcagtgattgaagta

SEQ ID NO: 254 - DNA, 23 bp, synthetic construct
  source 1..23: mol_type = other DNA
  modified_base 1: mod_base = OTHER; note = 2'-O-methyluridine-3'-phosphorothioate 5'-(E)-Vinylphosphonate
  modified_base 2: mod_base = OTHER; note = 2'-deoxyadenosine-3'-phosphorothioate
  modified_base 3: mod_base = OTHER; note = 2'-O-methylcytidine-3'-phosphate
  modified_base 4: mod_base = OTHER; note = 2'-O-methyluridine-3'-phosphate
  modified_base 6: mod_base = OTHER; note = 2'-O-methylcytidine-3'-phosphate
  modified_base 8: mod_base = OTHER; note = 2'-O-methyladenosine-3'-phosphate
  modified_base 9: mod_base = OTHER; note = 2'-O-methyluridine-3'-phosphate
  modified_base 10: mod_base = OTHER; note = 2'-O-methylcytidine-3'-phosphate
  modified_base 11: mod_base = OTHER; note = 2'-O-methyladenosine-3'-phosphate
  modified_base 13: mod_base = OTHER; note = 2'-O-methyluridine-3'-phosphate
  modified_base 14: mod_base = OTHER; note = 2'-deoxy-2'-fluoroguanosine-3'-phosphate
  modified_base 15: mod_base = OTHER; note = 2'-O-methylcytidine-3'-phosphate
  modified_base 16: mod_base = OTHER; note = 2'-O-methyluridine-3'-phosphate
  modified_base 17: mod_base = OTHER; note = 2'-O-methylguanosine-3'-phosphate
  modified_base 18: mod_base = OTHER; note = 2'-O-methyladenosine-3'-phosphate
  modified_base 19: mod_base = OTHER; note = 2'-O-methyluridine-3'-phosphate
  modified_base 20: mod_base = OTHER; note = 2'-O-methylguanosine-3'-phosphate
  modified_base 21: mod_base = OTHER; note = 2'-O-methylguanosine-3'-phosphorothioate
  modified_base 22: mod_base = OTHER; note = 2'-O-methyladenosine-3'-phosphorothioate
  modified_base 23: mod_base = OTHER; note = 2'-O-methyladenosine
  misc_feature 1: note = RNA
  misc_feature 3..4: note = RNA
  misc_feature 6: note = RNA
  misc_feature 8..11: note = RNA
  misc_feature 13..23: note = RNA
  misc_feature 2: note = DNA
  misc_feature 5: note = DNA
  misc_feature 7: note = DNA
  misc_feature 12: note = DNA
tacttcaatcactgctgatggaa

SEQ ID NO: 255 - RNA, 21 nt, synthetic construct
  source 1..21: mol_type = other RNA
  modified_base 1: mod_base = OTHER; note = 2'-O-methylguanosine-3'-phosphorothioate
  modified_base 2: mod_base = OTHER; note = 2'-O-methyladenosine-3'-phosphorothioate
  modified_base 3: mod_base = OTHER; note = 2'-O-methylguanosine-3'-phosphate
  modified_base 4: mod_base = OTHER; note = 2'-O-methylcytidine-3'-phosphate
  modified_base 5: mod_base = OTHER; note = 2'-O-methyladenosine-3'-phosphate
  modified_base 6: mod_base = OTHER; note = 2'-O-hexadecyl-adenosine-3'-phosphate
  modified_base 7: mod_base = OTHER; note = 2'-O-methylguanosine-3'-phosphate
  modified_base 8: mod_base = OTHER; note = 2'-O-methyluridine-3'-phosphate
  modified_base 9: mod_base = OTHER; note = 2'-deoxy-2'-fluoroguanosine-3'-phosphate
  modified_base 10: mod_base = OTHER; note = 2'-deoxy-2'-fluoroadenosine-3'-phosphate
  modified_base 11: mod_base = OTHER; note = 2'-deoxy-2'-fluorocytidine-3'-phosphate
  modified_base 12: mod_base = OTHER; note = 2'-O-methyladenosine-3'-phosphate
  modified_base 13: mod_base = OTHER; note = 2'-O-methyladenosine-3'-phosphate
  modified_base 14: mod_base = OTHER; note = 2'-O-methyladenosine-3'-phosphate
  modified_base 15: mod_base = OTHER; note = 2'-O-methyluridine-3'-phosphate
  modified_base 16: mod_base = OTHER; note = 2'-O-methylguanosine-3'-phosphate
  modified_base 17: mod_base = OTHER; note = 2'-O-methyluridine-3'-phosphate
  modified_base 18: mod_base = OTHER; note = 2'-O-methyluridine-3'-phosphate
  modified_base 19: mod_base = OTHER; note = 2'-O-methylguanosine-3'-phosphate
  modified_base 20: mod_base = OTHER; note = 2'-O-methylguanosine-3'-phosphate
  modified_base 21: mod_base = OTHER; note = 2'-O-methyladenosine-3'-phosphate ((2S,4R)-1-[29-[[2-(acetylamino)-2-deoxy-beta-D-galactopyra nosyl]oxy]-14,14-bis[[3-[[3-[[5-[[2-(acetylamino)-2-deoxy-b eta-D-galactopyranosyl]oxy]-1-oxopentyl]amino]propyl]amino] -3-oxopropoxy]methyl]-1,12,19,25-tetraoxo-16-oxa-13,20,24-t riazanonacos-1-yl]-4-hydroxy-2-pyrrolidinyl)methyl ester
gagcaagtgacaaatgttgga

SEQ ID NO: 256 - DNA, 23 bp, synthetic construct
  source 1..23: mol_type = other DNA
  modified_base 1: mod_base = OTHER; note = 2'-O-methyluridine-3'-phosphorothioate 5'-(E)-Vinylphosphonate
  modified_base 2: mod_base = OTHER; note = 2'-deoxycytidine-3'-phosphorothioate
  modified_base 3: mod_base = OTHER; note = 2'-O-methylcytidine-3'-phosphate
  modified_base 4: mod_base = OTHER; note = 2'-O-methyladenosine-3'-phosphate
  modified_base 6: mod_base = OTHER; note = 2'-O-methylcytidine-3'-phosphate
  modified_base 8: mod_base = OTHER; note = 2'-O-methyluridine-3'-phosphate
  modified_base 9: mod_base = OTHER; note = 2'-O-methyluridine-3'-phosphate
  modified_base 10: mod_base = OTHER; note = 2'-O-methyluridine-3'-phosphate
  modified_base 11: mod_base = OTHER; note = 2'-O-methylguanosine-3'-phosphate
  modified_base 13: mod_base = OTHER; note = 2'-O-methylcytidine-3'-phosphate
  modified_base 14: mod_base = OTHER; note = 2'-deoxy-2'-fluoroadenosine-3'-phosphate
  modified_base 15: mod_base = OTHER; note = 2'-O-methylcytidine-3'-phosphate
  modified_base 16: mod_base = OTHER; note = 2'-O-methyluridine-3'-phosphate
  modified_base 17: mod_base = OTHER; note = 2'-O-methyluridine-3'-phosphate
  modified_base 18: mod_base = OTHER; note = 2'-O-methylguanosine-3'-phosphate
  modified_base 19: mod_base = OTHER; note = 2'-O-methylcytidine-3'-phosphate
  modified_base 20: mod_base = OTHER; note = 2'-O-methyluridine-3'-phosphate
  modified_base 21: mod_base = OTHER; note = 2'-O-methylcytidine-3'-phosphorothioate
  modified_base 22: mod_base = OTHER; note = 2'-O-methyluridine-3'-phosphorothioate
  modified_base 23: mod_base = OTHER; note = 2'-O-methyluridine
  misc_feature 1: note = RNA
  misc_feature 3..4: note = RNA
  misc_feature 6: note = RNA
  misc_feature 8..11: note = RNA
  misc_feature 13..23: note = RNA
  misc_feature 2: note = DNA
  misc_feature 5: note = DNA
  misc_feature 7: note = DNA
  misc_feature 12: note = DNA
tccaacatttgtcacttgctctt

SEQ ID NO: 257 - RNA, 21 nt, synthetic construct
  source 1..21: mol_type = other RNA
  modified_base 1: mod_base = OTHER; note = 2'-O-methyluridine-3'-phosphorothioate
  modified_base 2: mod_base = OTHER; note = 2'-O-methylcytidine-3'-phosphorothioate
  modified_base 3: mod_base = OTHER; note = 2'-O-methylcytidine-3'-phosphate
  modified_base 4: mod_base = OTHER; note = 2'-O-methylcytidine-3'-phosphate
  modified_base 5: mod_base = OTHER; note = 2'-O-methyladenosine-3'-phosphate
  modified_base 6: mod_base = OTHER; note = 2'-O-methylguanosine-3'-phosphate
  modified_base 7: mod_base = OTHER; note = 2'-O-hexadecyl-uridine-3'-phosphate
  modified_base 8: mod_base = OTHER; note = 2'-O-methyluridine-3'-phosphate
  modified_base 9: mod_base = OTHER; note = 2'-deoxy-2'-fluorouridine-3'-phosphate
  modified_base 10: mod_base = OTHER; note = 2'-deoxy-2'-fluorocytidine-3'-phosphate
  modified_base 11: mod_base = OTHER; note = 2'-deoxy-2'-fluorouridine-3'-phosphate
  modified_base 12: mod_base = OTHER; note = 2'-O-methyluridine-3'-phosphate
  modified_base 13: mod_base = OTHER; note = 2'-O-methylguanosine-3'-phosphate
  modified_base 14: mod_base = OTHER; note = 2'-O-methyladenosine-3'-phosphate
  modified_base 15: mod_base = OTHER; note = 2'-O-methylguanosine-3'-phosphate
  modified_base 16: mod_base = OTHER; note = 2'-O-methyladenosine-3'-phosphate
  modified_base 17: mod_base = OTHER; note = 2'-O-methyluridine-3'-phosphate
  modified_base 18: mod_base = OTHER; note = 2'-O-methylcytidine-3'-phosphate
  modified_base 19: mod_base = OTHER; note = 2'-O-methyluridine-3'-phosphate
  modified_base 20: mod_base = OTHER; note = 2'-O-methylguanosine-3'-phosphate
  modified_base 21: mod_base = OTHER; note = 2'-O-methyladenosine-3'-phosphate ((2S,4R)-1-[29-[[2-(acetylamino)-2-deoxy-beta-D-galactopyra nosyl]oxy]-14,14-bis[[3-[[3-[[5-[[2-(acetylamino)-2-deoxy-b eta-D-galactopyranosyl]oxy]-1-oxopentyl]amino]propyl]amino] -3-oxopropoxy]methyl]-1,12,19,25-tetraoxo-16-oxa-13,20,24-t riazanonacos-1-yl]-4-hydroxy-2-pyrrolidinyl)methyl ester
tcccagtttcttgagatctga

SEQ ID NO: 258 - DNA, 23 bp, synthetic construct
  source 1..23: mol_type = other DNA
  modified_base 1: mod_base = OTHER; note = 2'-O-methyluridine-3'-phosphorothioate 5'-(E)-Vinylphosphonate
  modified_base 2: mod_base = OTHER; note = 2'-deoxycytidine-3'-phosphorothioate
  modified_base 3: mod_base = OTHER; note = 2'-O-methyladenosine-3'-phosphate
  modified_base 4: mod_base = OTHER; note = 2'-O-methylguanosine-3'-phosphate
  modified_base 6: mod_base = OTHER; note = 2'-O-methyluridine-3'-phosphate
  modified_base 8: mod_base = OTHER; note = 2'-O-methyluridine-3'-phosphate
  modified_base 9: mod_base = OTHER; note = 2'-O-methylcytidine-3'-phosphate
  modified_base 10: mod_base = OTHER; note = 2'-O-methyladenosine-3'-phosphate
  modified_base 11: mod_base = OTHER; note = 2'-O-methyladenosine-3'-phosphate
  modified_base 13: mod_base = OTHER; note = 2'-O-methyladenosine-3'-phosphate
  modified_base 14: mod_base = OTHER; note = 2'-deoxy-2'-fluoroadenosine-3'-phosphate
  modified_base 15: mod_base = OTHER; note = 2'-O-methyladenosine-3'-phosphate
  modified_base 16: mod_base = OTHER; note = 2'-O-methylcytidine-3'-phosphate
  modified_base 17: mod_base = OTHER; note = 2'-O-methyluridine-3'-phosphate
  modified_base 18: mod_base = OTHER; note = 2'-O-methylguanosine-3'-phosphate
  modified_base 19: mod_base = OTHER; note = 2'-O-methylguanosine-3'-phosphate
  modified_base 20: mod_base = OTHER; note = 2'-O-methylguanosine-3'-phosphate
  modified_base 21: mod_base = OTHER; note = 2'-O-methyladenosine-3'-phosphorothioate
  modified_base 22: mod_base = OTHER; note = 2'-O-methylguanosine-3'-phosphorothioate
  modified_base 23: mod_base = OTHER; note = 2'-O-methylcytidine
  misc_feature 1: note = RNA
  misc_feature 3..4: note = RNA
  misc_feature 6: note = RNA
  misc_feature 8..11: note = RNA
  misc_feature 13..23: note = RNA
  misc_feature 2: note = DNA
  misc_feature 5: note = DNA
  misc_feature 7: note = DNA
  misc_feature 12: note = DNA
tcagatctcaagaaactgggagc

SEQ ID NO: 259 - RNA, 21 nt, synthetic construct
  source 1..21: mol_type = other RNA
  modified_base 1: mod_base = OTHER; note = 2'-O-methyluridine-3'-phosphorothioate
  modified_base 2: mod_base = OTHER; note = 2'-O-methylcytidine-3'-phosphorothioate
  modified_base 3: mod_base = OTHER; note = 2'-O-methyladenosine-3'-phosphate
  modified_base 4: mod_base = OTHER; note = 2'-O-methyluridine-3'-phosphate
  modified_base 5: mod_base = OTHER; note = 2'-O-methylguanosine-3'-phosphate
  modified_base 6: mod_base = OTHER; note = 2'-O-hexadecyl-adenosine-3'-phosphate
  modified_base 7: mod_base = OTHER; note = 2'-O-methyladenosine-3'-phosphate
  modified_base 8: mod_base = OTHER; note = 2'-O-methyladenosine-3'-phosphate
  modified_base 9: mod_base = OTHER; note = 2'-deoxy-2'-fluoroguanosine-3'-phosphate
  modified_base 10: mod_base = OTHER; note = 2'-deoxy-2'-fluoroguanosine-3'-phosphate
  modified_base 11: mod_base = OTHER; note = 2'-deoxy-2'-fluoroadenosine-3'-phosphate
  modified_base 12: mod_base = OTHER; note = 2'-O-methylcytidine-3'-phosphate
  modified_base 13: mod_base = OTHER; note = 2'-O-methyluridine-3'-phosphate
  modified_base 14: mod_base = OTHER; note = 2'-O-methyluridine-3'-phosphate
  modified_base 15: mod_base = OTHER; note = 2'-O-methyluridine-3'-phosphate
  modified_base 16: mod_base = OTHER; note = 2'-O-methylcytidine-3'-phosphate
  modified_base 17: mod_base = OTHER; note = 2'-O-methyladenosine-3'-phosphate
  modified_base 18: mod_base = OTHER; note = 2'-O-methyladenosine-3'-phosphate
  modified_base 19: mod_base = OTHER; note = 2'-O-methyladenosine-3'-phosphate
  modified_base 20: mod_base = OTHER; note = 2'-O-methylguanosine-3'-phosphate
  modified_base 21: mod_base = OTHER; note = 2'-O-methyladenosine-3'-phosphate ((2S,4R)-1-[29-[[2-(acetylamino)-2-deoxy-beta-D-galactopyra nosyl]oxy]-14,14-bis[[3-[[3-[[5-[[2-(acetylamino)-2-deoxy-b eta-D-galactopyranosyl]oxy]-1-oxopentyl]amino]propyl]amino] -3-oxopropoxy]methyl]-1,12,19,25-tetraoxo-16-oxa-13,20,24-t riazanonacos-1-yl]-4-hydroxy-2-pyrrolidinyl)methyl ester
tcatgaaaggactttcaaaga

SEQ ID NO: 260 - DNA, 23 bp, synthetic construct
  source 1..23: mol_type = other DNA
  modified_base 1: mod_base = OTHER; note = 2'-O-methyluridine-3'-phosphorothioate 5'-(E)-Vinylphosphonate
  modified_base 2: mod_base = OTHER; note = 2'-deoxycytidine-3'-phosphorothioate
  modified_base 3: mod_base = OTHER; note = 2'-O-methyluridine-3'-phosphate
  modified_base 4: mod_base = OTHER; note = 2'-O-methyluridine-3'-phosphate
  modified_base 6: mod_base = OTHER; note = 2'-O-methylguanosine-3'-phosphate
  modified_base 8: mod_base = OTHER; note = 2'-O-methyladenosine-3'-phosphate
  modified_base 9: mod_base = OTHER; note = 2'-O-methyladenosine-3'-phosphate
  modified_base 10: mod_base = OTHER; note = 2'-O-methylguanosine-3'-phosphate
  modified_base 11: mod_base = OTHER; note = 2'-O-methyluridine-3'-phosphate
  modified_base 13: mod_base = OTHER; note = 2'-O-methylcytidine-3'-phosphate
  modified_base 14: mod_base = OTHER; note = 2'-deoxy-2'-fluorouridine-3'-phosphate
  modified_base 15: mod_base = OTHER; note = 2'-O-methyluridine-3'-phosphate
  modified_base 16: mod_base = OTHER; note = 2'-O-methyluridine-3'-phosphate
  modified_base 17: mod_base = OTHER; note = 2'-O-methylcytidine-3'-phosphate
  modified_base 18: mod_base = OTHER; note = 2'-O-methyladenosine-3'-phosphate
  modified_base 19: mod_base = OTHER; note = 2'-O-methyluridine-3'-phosphate
  modified_base 20: mod_base = OTHER; note = 2'-O-methylguanosine-3'-phosphate
  modified_base 21: mod_base = OTHER; note = 2'-O-methyladenosine-3'-phosphorothioate
  modified_base 22: mod_base = OTHER; note = 2'-O-methyladenosine-3'-phosphorothioate
  modified_base 23: mod_base = OTHER; note = 2'-O-methyluridine
  misc_feature 1: note = RNA
  misc_feature 3..4: note = RNA
  misc_feature 6: note = RNA
  misc_feature 8..11: note = RNA
  misc_feature 13..23: note = RNA
  misc_feature 2: note = DNA
  misc_feature 5: note = DNA
  misc_feature 7: note = DNA
  misc_feature 12: note = DNA
tctttgaaagtcctttcatgaat

SEQ ID NO: 261 - RNA, 21 nt, synthetic construct
  source 1..21: mol_type = other RNA
  modified_base 1: mod_base = OTHER; note = 2'-O-methyluridine-3'-phosphorothioate
  modified_base 2: mod_base = OTHER; note = 2'-O-methylcytidine-3'-phosphorothioate
  modified_base 3: mod_base = OTHER; note = 2'-O-methylcytidine-3'-phosphate
  modified_base 4: mod_base = OTHER; note = 2'-O-methylcytidine-3'-phosphate
  modified_base 5: mod_base = OTHER; note = 2'-O-methyladenosine-3'-phosphate
  modified_base 6: mod_base = OTHER; note = 2'-O-methylguanosine-3'-phosphate
  modified_base 7: mod_base = OTHER; note = 2'-O-hexadecyl-uridine-3'-phosphate
  modified_base 8: mod_base = OTHER; note = 2'-O-methyluridine-3'-phosphate
  modified_base 9: mod_base = OTHER; note = 2'-deoxy-2'-fluorouridine-3'-phosphate
  modified_base 10: mod_base = OTHER; note = 2'-deoxy-2'-fluorocytidine-3'-phosphate
  modified_base 11: mod_base = OTHER; note = 2'-deoxy-2'-fluorouridine-3'-phosphate
  modified_base 12: mod_base = OTHER; note = 2'-O-methyluridine-3'-phosphate
  modified_base 13: mod_base = OTHER; note = 2'-O-methylguanosine-3'-phosphate
  modified_base 14: mod_base = OTHER; note = 2'-O-methyladenosine-3'-phosphate
  modified_base 15: mod_base = OTHER; note = 2'-O-methylguanosine-3'-phosphate
  modified_base 16: mod_base = OTHER; note = 2'-O-methyladenosine-3'-phosphate
  modified_base 17: mod_base = OTHER; note = 2'-O-methyluridine-3'-phosphate
  modified_base 18: mod_base = OTHER; note = 2'-O-methylcytidine-3'-phosphate
  modified_base 19: mod_base = OTHER; note = 2'-O-methyluridine-3'-phosphorothioate
  modified_base 20: mod_base = OTHER; note = 2'-O-methylguanosine-3'-phosphorothioate
  modified_base 21: mod_base = OTHER; note = 2'-O-methyladenosine
tcccagtttcttgagatctga

SEQ ID NO: 262 - DNA, 23 bp, synthetic construct
  source 1..23: mol_type = other DNA
  modified_base 1: mod_base = OTHER; note = 2'-O-methyluridine-3'-phosphorothioate 5'-(E)-Vinylphosphonate
  modified_base 2: mod_base = OTHER; note = 2'-deoxycytidine-3'-phosphorothioate
  modified_base 3: mod_base = OTHER; note = 2'-O-methyladenosine-3'-phosphate
  modified_base 4: mod_base = OTHER; note = 2'-O-methylguanosine-3'-phosphate
  modified_base 6: mod_base = OTHER; note = 2'-O-methyluridine-3'-phosphate
  modified_base 8: mod_base = OTHER; note = 2'-O-methyluridine-3'-phosphate
  modified_base 9: mod_base = OTHER; note = 2'-O-methylcytidine-3'-phosphate
  modified_base 10: mod_base = OTHER; note = 2'-O-methyladenosine-3'-phosphate
  modified_base 11: mod_base = OTHER; note = 2'-O-methyladenosine-3'-phosphate
  modified_base 13: mod_base = OTHER; note = 2'-O-methyladenosine-3'-phosphate
  modified_base 14: mod_base = OTHER; note = 2'-deoxy-2'-fluoroadenosine-3'-phosphate
  modified_base 15: mod_base = OTHER; note = 2'-O-methyladenosine-3'-phosphate
  modified_base 16: mod_base = OTHER; note = 2'-O-methylcytidine-3'-phosphate
  modified_base 17: mod_base = OTHER; note = 2'-O-methyluridine-3'-phosphate
  modified_base 18: mod_base = OTHER; note = 2'-O-methylguanosine-3'-phosphate
  modified_base 19: mod_base = OTHER; note = 2'-O-methylguanosine-3'-phosphate
  modified_base 20: mod_base = OTHER; note = 2'-O-methylguanosine-3'-phosphate
  modified_base 21: mod_base = OTHER; note = 2'-O-methyladenosine-3'-phosphorothioate
  modified_base 22: mod_base = OTHER; note = 2'-O-methylguanosine-3'-phosphorothioate
  modified_base 23: mod_base = OTHER; note = 2'-O-methylcytidine
  misc_feature 1: note = RNA
  misc_feature 3..4: note = RNA
  misc_feature 6: note = RNA
  misc_feature 8..11: note = RNA
  misc_feature 13..23: note = RNA
  misc_feature 2: note = DNA
  misc_feature 5: note = DNA
  misc_feature 7: note = DNA
  misc_feature 12: note = DNA
tcagatctcaagaaactgggagc

SEQ ID NO: 263 - RNA, 21 nt, synthetic construct
  source 1..21: mol_type = other RNA
  modified_base 1: mod_base = OTHER; note = 2'-O-methylguanosine-3'-phosphorothioate
  modified_base 2: mod_base = OTHER; note = 2'-O-methylcytidine-3'-phosphorothioate
  modified_base 3: mod_base = OTHER; note = 2'-O-methyladenosine-3'-phosphate
  modified_base 4: mod_base = OTHER; note = 2'-O-methylguanosine-3'-phosphate
  modified_base 5: mod_base = OTHER; note = 2'-O-methyluridine-3'-phosphate
  modified_base 6: mod_base = OTHER; note = 2'-O-methylguanosine-3'-phosphate
  modified_base 7: mod_base = OTHER; note = 2'-O-methyladenosine-3'-phosphate
  modified_base 8: mod_base = OTHER; note = 2'-O-methyluridine-3'-phosphate
  modified_base 9: mod_base = OTHER; note = 2'-deoxy-2'-fluorouridine-3'-phosphate
  modified_base 10: mod_base = OTHER; note = 2'-deoxy-2'-fluoroguanosine-3'-phosphate
  modified_base 11: mod_base = OTHER; note = 2'-deoxy-2'-fluoroadenosine-3'-phosphate
  modified_base 12: mod_base = OTHER; note = 2'-O-methyladenosine-3'-phosphate
  modified_base 13: mod_base = OTHER; note = 2'-O-methylguanosine-3'-phosphate
  modified_base 14: mod_base = OTHER; note = 2'-O-methyluridine-3'-phosphate
  modified_base 15: mod_base = OTHER; note = 2'-O-methyladenosine-3'-phosphate
  modified_base 16: mod_base = OTHER; note = 2'-O-hexadecyl-uridine-3'-phosphate
  modified_base 17: mod_base = OTHER; note = 2'-O-methylcytidine-3'-phosphate
  modified_base 18: mod_base = OTHER; note = 2'-O-methyluridine-3'-phosphate
  modified_base 19: mod_base = OTHER; note = 2'-O-methylguanosine-3'-phosphate
  modified_base 20: mod_base = OTHER; note = 2'-O-methyluridine-3'-phosphate
  modified_base 21: mod_base = OTHER; note = 2'-O-methyladenosine-3'-phosphate ((2S,4R)-1-[29-[[2-(acetylamino)-2-deoxy-beta-D-galactopyra nosyl]oxy]-14,14-bis[[3-[[3-[[5-[[2-(acetylamino)-2-deoxy-b eta-D-galactopyranosyl]oxy]-1-oxopentyl]amino]propyl]amino] -3-oxopropoxy]methyl]-1,12,19,25-tetraoxo-16-oxa-13,20,24-t riazanonacos-1-yl]-4-hydroxy-2-pyrrolidinyl)methyl ester
gcagtgattgaagtatctgta

SEQ ID NO: 264 - DNA, 23 bp, synthetic construct
  source 1..23: mol_type = other DNA
  modified_base 1: mod_base = OTHER; note = 2'-O-methyluridine-3'-phosphorothioate 5'-(E)-Vinylphosphonate
  modified_base 2: mod_base = OTHER; note = 2'-deoxyadenosine-3'-phosphorothioate
  modified_base 3: mod_base = OTHER; note = 2'-O-methylcytidine-3'-phosphate
  modified_base 4: mod_base = OTHER; note = 2'-O-methyladenosine-3'-phosphate
  modified_base 6: mod_base = OTHER; note = 2'-O-methyladenosine-3'-phosphate
  modified_base 8: mod_base = OTHER; note = 2'-O-methyladenosine-3'-phosphate
  modified_base 9: mod_base = OTHER; note = 2'-O-methylcytidine-3'-phosphate
  modified_base 10: mod_base = OTHER; note = 2'-O-methyluridine-3'-phosphate
  modified_base 11: mod_base = OTHER; note = 2'-O-methyluridine-3'-phosphate
  modified_base 13: mod_base = OTHER; note = 2'-O-methyladenosine-3'-phosphate
  modified_base 14: mod_base = OTHER; note = 2'-deoxy-2'-fluoroadenosine-3'-phosphate
  modified_base 15: mod_base = OTHER; note = 2'-O-methyluridine-3'-phosphate
  modified_base 16: mod_base = OTHER; note = 2'-O-methylcytidine-3'-phosphate
  modified_base 17: mod_base = OTHER; note = 2'-O-methyladenosine-3'-phosphate
  modified_base 18: mod_base = OTHER; note = 2'-O-methylcytidine-3'-phosphate
  modified_base 19: mod_base = OTHER; note = 2'-O-methyluridine-3'-phosphate
  modified_base 20: mod_base = OTHER; note = 2'-O-methylguanosine-3'-phosphate
  modified_base 21: mod_base = OTHER; note = 2'-O-methylcytidine-3'-phosphorothioate
  modified_base 22: mod_base = OTHER; note = 2'-O-methyluridine-3'-phosphorothioate
  modified_base 23: mod_base = OTHER; note = 2'-O-methylguanosine
  misc_feature 1: note = RNA
  misc_feature 3..4: note = RNA
  misc_feature 6: note = RNA
  misc_feature 8..11: note = RNA
  misc_feature 13..23: note = RNA
  misc_feature 2: note = DNA
  misc_feature 5: note = DNA
  misc_feature 7: note = DNA
  misc_feature 12: note = DNA
tacagatacttcaatcactgctg

SEQ ID NO: 265 - RNA, 21 nt, synthetic construct
  source 1..21: mol_type = other RNA
gcagtgattgaagtatctgta

SEQ ID NO: 266 - RNA, 23 nt, synthetic construct
  source 1..23: mol_type = other RNA
  modified_base 7: mod_base = OTHER; note = 5'-methyluridine-3'-phosphate
tacagatacttcaatcactgctg

SEQ ID NO: 267 - RNA, 21 nt, synthetic construct
  source 1..21: mol_type = other RNA
  modified_base 1: mod_base = OTHER; note = 2'-O-methylguanosine-3'-phosphorothioate
  modified_base 2: mod_base = OTHER; note = 2'-O-methylcytidine-3'-phosphorothioate
  modified_base 3: mod_base = OTHER; note = 2'-O-methyladenosine-3'-phosphate
  modified_base 4: mod_base = OTHER; note = 2'-O-methylguanosine-3'-phosphate
  modified_base 5: mod_base = OTHER; note = 2'-O-methyluridine-3'-phosphate
  modified_base 6: mod_base = OTHER; note = 2'-O-methylguanosine-3'-phosphate
  modified_base 7: mod_base = OTHER; note = 2'-O-methyladenosine-3'-phosphate
  modified_base 8: mod_base = OTHER; note = 2'-O-methyluridine-3'-phosphate
  modified_base 9: mod_base = OTHER; note = 2'-deoxy-2'-fluorouridine-3'-phosphate
  modified_base 10: mod_base = OTHER; note = 2'-deoxy-2'-fluoroguanosine-3'-phosphate
  modified_base 11: mod_base = OTHER; note = 2'-deoxy-2'-fluoroadenosine-3'-phosphate
  modified_base 12: mod_base = OTHER; note = 2'-O-methyladenosine-3'-phosphate
  modified_base 13: mod_base = OTHER; note = 2'-O-methylguanosine-3'-phosphate
  modified_base 14: mod_base = OTHER; note = 2'-O-methyluridine-3'-phosphate
  modified_base 15: mod_base = OTHER; note = 2'-O-methyladenosine-3'-phosphate
  modified_base 16: mod_base = OTHER; note = 2'-O-hexadecyl-uridine-3'-phosphate
  modified_base 17: mod_base = OTHER; note = 2'-O-methylcytidine-3'-phosphate
  modified_base 18: mod_base = OTHER; note = 2'-O-methyluridine-3'-phosphate
  modified_base 19: mod_base = OTHER; note = 2'-O-methylguanosine-3'-phosphorothioate
  modified_base 20: mod_base = OTHER; note = 2'-O-methyluridine-3'-phosphorothioate
  modified_base 21: mod_base = OTHER; note = 2'-O-methyladenosine
gcagtgattgaagtatctgta

SEQ ID NO: 268 - RNA, 21 nt, synthetic construct
  source 1..21: mol_type = other RNA
  modified_base 1: mod_base = OTHER; note = 2'-O-methyluridine-3'-phosphorothioate
  modified_base 2: mod_base = OTHER; note = 2'-O-methylcytidine-3'-phosphorothioate
  modified_base 3: mod_base = OTHER; note = 2'-O-methyluridine-3'-phosphate
  modified_base 4: mod_base = OTHER; note = 2'-O-methyluridine-3'-phosphate
  modified_base 5: mod_base = OTHER; note = 2'-O-methyluridine-3'-phosphate
  modified_base 6: mod_base = OTHER; note = 2'-O-hexadecyl-guanosine-3'-phosphate
  modified_base 7: mod_base = OTHER; note = 2'-O-methylcytidine-3'-phosphate
  modified_base 8: mod_base = OTHER; note = 2'-O-methyluridine-3'-phosphate
  modified_base 9: mod_base = OTHER; note = 2'-deoxy-2'-fluorocytidine-3'-phosphate
  modified_base 10: mod_base = OTHER; note = 2'-deoxy-2'-fluorocytidine-3'-phosphate
  modified_base 11: mod_base = OTHER; note = 2'-deoxy-2'-fluorocytidine-3'-phosphate
  modified_base 12: mod_base = OTHER; note = 2'-O-methyladenosine-3'-phosphate
  modified_base 13: mod_base = OTHER; note = 2'-O-methylguanosine-3'-phosphate
  modified_base 14: mod_base = OTHER; note = 2'-O-methyluridine-3'-phosphate
  modified_base 15: mod_base = OTHER; note = 2'-O-methyluridine-3'-phosphate
  modified_base 16: mod_base = OTHER; note = 2'-O-methyluridine-3'-phosphate
  modified_base 17: mod_base = OTHER; note = 2'-O-methylcytidine-3'-phosphate
  modified_base 18: mod_base = OTHER; note = 2'-O-methyluridine-3'-phosphate
  modified_base 19: mod_base = OTHER; note = 2'-O-methyluridine-3'-phosphate
  modified_base 20: mod_base = OTHER; note = 2'-O-methylguanosine-3'-phosphate
  modified_base 21: mod_base = OTHER; note = 2'-O-methyladenosine-3'-phosphate ((2S,4R)-1-[29-[[2-(acetylamino)-2-deoxy-beta-D-galactopyra nosyl]oxy]-14,14-bis[[3-[[3-[[5-[[2-(acetylamino)-2-deoxy-b eta-D-galactopyranosyl]oxy]-1-oxopentyl]amino]propyl]amino] -3-oxopropoxy]methyl]-1,12,19,25-tetraoxo-16-oxa-13,20,24-t riazanonacos-1-yl]-4-hydroxy-2-pyrrolidinyl)methyl ester
tctttgctcccagtttcttga

SEQ ID NO: 269 - DNA, 23 bp, synthetic construct
  source 1..23: mol_type = other DNA
  modified_base 1: mod_base = OTHER; note = 2'-O-methyluridine-3'-phosphorothioate 5'-(E)-Vinylphosphonate
  modified_base 2: mod_base = OTHER; note = 2'-deoxycytidine-3'-phosphorothioate
  modified_base 3: mod_base = OTHER; note = 2'-O-methyladenosine-3'-phosphate
  modified_base 4: mod_base = OTHER; note = 2'-O-methyladenosine-3'-phosphate
  modified_base 6: mod_base = OTHER; note = 2'-O-methyladenosine-3'-phosphate
  modified_base 8: mod_base = OTHER; note = 2'-O-methyladenosine-3'-phosphate
  modified_base 9: mod_base = OTHER; note = 2'-O-methylcytidine-3'-phosphate
  modified_base 10: mod_base = OTHER; note = 2'-O-methyluridine-3'-phosphate
  modified_base 11: mod_base = OTHER; note = 2'-O-methylguanosine-3'-phosphate
  modified_base 13: mod_base = OTHER; note = 2'-O-methylguanosine-3'-phosphate
  modified_base 14: mod_base = OTHER; note = 2'-deoxy-2'-fluoroadenosine-3'-phosphate
  modified_base 15: mod_base = OTHER; note = 2'-O-methylguanosine-3'-phosphate
  modified_base 16: mod_base = OTHER; note = 2'-O-methylcytidine-3'-phosphate
  modified_base 17: mod_base = OTHER; note = 2'-O-methyladenosine-3'-phosphate
  modified_base 18: mod_base = OTHER; note = 2'-O-methyladenosine-3'-phosphate
  modified_base 19: mod_base = OTHER; note = 2'-O-methyladenosine-3'-phosphate
  modified_base 20: mod_base = OTHER; note = 2'-O-methylguanosine-3'-phosphate
  modified_base 21: mod_base = OTHER; note = 2'-O-methyladenosine-3'-phosphorothioate
  modified_base 22: mod_base = OTHER; note = 2'-O-methyluridine-3'-phosphorothioate
  modified_base 23: mod_base = OTHER; note = 2'-O-methyladenosine
  misc_feature 1: note = RNA
  misc_feature 3..4: note = RNA
  misc_feature 6: note = RNA
  misc_feature 8..11: note = RNA
  misc_feature 13..23: note = RNA
  misc_feature 2: note = DNA
  misc_feature 5: note = DNA
  misc_feature 7: note = DNA
  misc_feature 12: note = DNA
tcaagaaactgggagcaaagata

SEQ ID NO: 270 - RNA, 21 nt, synthetic construct
  source 1..21: mol_type = other RNA
  modified_base 1: mod_base = OTHER; note = 2'-O-methyluridine-3'-phosphorothioate
  modified_base 2: mod_base = OTHER; note = 2'-O-methylguanosine-3'-phosphorothioate
  modified_base 3: mod_base = OTHER; note = 2'-O-methyluridine-3'-phosphate
  modified_base 4: mod_base = OTHER; note = 2'-O-methylguanosine-3'-phosphate
  modified_base 5: mod_base = OTHER; note = 2'-O-methylguanosine-3'-phosphate
  modified_base 6: mod_base = OTHER; note = 2'-O-hexadecyl-uridine-3'-phosphate
  modified_base 7: mod_base = OTHER; note = 2'-O-methylguanosine-3'-phosphate
  modified_base 8: mod_base = OTHER; note = 2'-O-methyluridine-3'-phosphate
  modified_base 9: mod_base = OTHER; note = 2'-deoxy-2'-fluoroadenosine-3'-phosphate
  modified_base 10: mod_base = OTHER; note = 2'-deoxy-2'-fluoroadenosine-3'-phosphate
  modified_base 11: mod_base = OTHER; note = 2'-deoxy-2'-fluoroadenosine-3'-phosphate
  modified_base 12: mod_base = OTHER; note = 2'-O-methylguanosine-3'-phosphate
  modified_base 13: mod_base = OTHER; note = 2'-O-methylguanosine-3'-phosphate
  modified_base 14: mod_base = OTHER; note = 2'-O-methyladenosine-3'-phosphate
  modified_base 15: mod_base = OTHER; note = 2'-O-methyladenosine-3'-phosphate
  modified_base 16: mod_base = OTHER; note = 2'-O-methyluridine-3'-phosphate
  modified_base 17: mod_base = OTHER; note = 2'-O-methyluridine-3'-phosphate
  modified_base 18: mod_base = OTHER; note = 2'-O-methylcytidine-3'-phosphate
  modified_base 19: mod_base = OTHER; note = 2'-O-methyladenosine-3'-phosphate
  modified_base 20: mod_base = OTHER; note = 2'-O-methyluridine-3'-phosphate
  modified_base 21: mod_base = OTHER; note = 2'-O-methyladenosine-3'-phosphate ((2S,4R)-1-[29-[[2-(acetylamino)-2-deoxy-beta-D-galactopyra nosyl]oxy]-14,14-bis[[3-[[3-[[5-[[2-(acetylamino)-2-deoxy-b eta-D-galactopyranosyl]oxy]-1-oxopentyl]amino]propyl]amino] -3-oxopropoxy]methyl]-1,12,19,25-tetraoxo-16-oxa-13,20,24-t riazanonacos-1-yl]-4-hydroxy-2-pyrrolidinyl)methyl ester
tgtggtgtaaaggaattcata

SEQ ID NO: 271 - RNA, 21 nt, synthetic construct
  source 1..21: mol_type = other RNA
  modified_base 1: mod_base = OTHER; note = 2'-O-methylguanosine-3'-phosphorothioate
  modified_base 2: mod_base = OTHER; note = 2'-O-methylguanosine-3'-phosphorothioate
  modified_base 3: mod_base = OTHER; note = 2'-O-methyluridine-3'-phosphate
  modified_base 4: mod_base = OTHER; note = 2'-O-methylguanosine-3'-phosphate
  modified_base 5: mod_base = OTHER; note = 2'-O-methyluridine-3'-phosphate
  modified_base 6: mod_base = OTHER; note = 2'-O-hexadecyl-adenosine-3'-phosphate
  modified_base 7: mod_base = OTHER; note = 2'-O-methyladenosine-3'-phosphate
  modified_base 8: mod_base = OTHER; note = 2'-O-methyladenosine-3'-phosphate
  modified_base 9: mod_base = OTHER; note = 2'-deoxy-2'-fluoroguanosine-3'-phosphate
  modified_base 10: mod_base = OTHER; note = 2'-deoxy-2'-fluoroguanosine-3'-phosphate
  modified_base 11: mod_base = OTHER; note = 2'-deoxy-2'-fluoroadenosine-3'-phosphate
  modified_base 12: mod_base = OTHER; note = 2'-O-methyladenosine-3'-phosphate
  modified_base 13: mod_base = OTHER; note = 2'-O-methyluridine-3'-phosphate
  modified_base 14: mod_base = OTHER; note = 2'-O-methyluridine-3'-phosphate
  modified_base 15: mod_base = OTHER; note = 2'-O-methylcytidine-3'-phosphate
  modified_base 16: mod_base = OTHER; note = 2'-O-methyladenosine-3'-phosphate
  modified_base 17: mod_base = OTHER; note = 2'-O-methyluridine-3'-phosphate
  modified_base 18: mod_base = OTHER; note = 2'-O-methyluridine-3'-phosphate
  modified_base 19: mod_base = OTHER; note = 2'-O-methyladenosine-3'-phosphate
  modified_base 20: mod_base = OTHER; note = 2'-O-methylguanosine-3'-phosphate
  modified_base 21: mod_base = OTHER; note = 2'-O-methyladenosine-3'-phosphate ((2S,4R)-1-[29-[[2-(acetylamino)-2-deoxy-beta-D-galactopyra nosyl]oxy]-14,14-bis[[3-[[3-[[5-[[2-(acetylamino)-2-deoxy-b eta-D-galactopyranosyl]oxy]-1-oxopentyl]amino]propyl]amino] -3-oxopropoxy]methyl]-1,12,19,25-tetraoxo-16-oxa-13,20,24-t riazanonacos-1-yl]-4-hydroxy-2-pyrrolidinyl)methyl ester
ggtgtaaaggaattcattaga

SEQ ID NO: 272 - RNA, 21 nt, synthetic construct
  source 1..21: mol_type = other RNA
  modified_base 1: mod_base = OTHER; note = 2'-O-methyladenosine-3'-phosphorothioate
  modified_base 2: mod_base = OTHER; note = 2'-O-methyluridine-3'-phosphorothioate
  modified_base 3: mod_base = OTHER; note = 2'-O-methyluridine-3'-phosphate
  modified_base 4: mod_base = OTHER; note = 2'-O-methyladenosine-3'-phosphate
  modified_base 5: mod_base = OTHER; note = 2'-O-methylguanosine-3'-phosphate
  modified_base 6: mod_base = OTHER; note = 2'-O-hexadecyl-cytidine-3'-phosphate
  modified_base 7: mod_base = OTHER; note = 2'-O-methylcytidine-3'-phosphate
  modified_base 8: mod_base = OTHER; note = 2'-O-methyladenosine-3'-phosphate
  modified_base 9: mod_base = OTHER; note = 2'-deoxy-2'-fluorouridine-3'-phosphate
  modified_base 10: mod_base = OTHER; note = 2'-deoxy-2'-fluoroguanosine-3'-phosphate
  modified_base 11: mod_base = OTHER; note = 2'-deoxy-2'-fluoroguanosine-3'-phosphate
  modified_base 12: mod_base = OTHER; note = 2'-O-methyladenosine-3'-phosphate
  modified_base 13: mod_base = OTHER; note = 2'-O-methyluridine-3'-phosphate
  modified_base 14: mod_base = OTHER; note = 2'-O-methylguanosine-3'-phosphate
  modified_base 15: mod_base = OTHER; note = 2'-O-methyluridine-3'-phosphate
  modified_base 16: mod_base = OTHER; note = 2'-O-methyladenosine-3'-phosphate
  modified_base 17: mod_base = OTHER; note = 2'-O-methyluridine-3'-phosphate
  modified_base 18: mod_base = OTHER; note = 2'-O-methyluridine-3'-phosphate
  modified_base 19: mod_base = OTHER; note = 2'-O-methylcytidine-3'-phosphate
  modified_base 20: mod_base = OTHER; note = 2'-O-methyladenosine-3'-phosphate
  modified_base 21: mod_base = OTHER; note = 2'-O-methyladenosine-3'-phosphate ((2S,4R)-1-[29-[[2-(acetylamino)-2-deoxy-beta-D-galactopyra nosyl]oxy]-14,14-bis[[3-[[3-[[5-[[2-(acetylamino)-2-deoxy-b eta-D-galactopyranosyl]oxy]-1-oxopentyl]amino]propyl]amino] -3-oxopropoxy]methyl]-1,12,19,25-tetraoxo-16-oxa-13,20,24-t riazanonacos-1-yl]-4-hydroxy-2-pyrrolidinyl)methyl ester
attagccatggatgtattcaa

SEQ ID NO: 273 - RNA, 21 nt, synthetic construct
  source 1..21: mol_type = other RNA
  modified_base 1: mod_base = OTHER; note = 2'-O-methyluridine-3'-phosphorothioate
  modified_base 2: mod_base = OTHER; note = 2'-O-methyluridine-3'-phosphorothioate
  modified_base 3: mod_base = OTHER; note = 2'-O-methyladenosine-3'-phosphate
  modified_base 4: mod_base = OTHER; note = 2'-O-methylguanosine-3'-phosphate
  modified_base 5: mod_base = OTHER; note = 2'-O-methylcytidine-3'-phosphate
  modified_base 6: mod_base = OTHER; note = 2'-O-hexadecyl-cytidine-3'-phosphate
  modified_base 7: mod_base = OTHER; note = 2'-O-methyladenosine-3'-phosphate
  modified_base 8: mod_base = OTHER; note = 2'-O-methyluridine-3'-phosphate
  modified_base 9: mod_base = OTHER; note = 2'-deoxy-2'-fluoroguanosine-3'-phosphate
  modified_base 10: mod_base = OTHER; note = 2'-deoxy-2'-fluoroguanosine-3'-phosphate
  modified_base 11: mod_base = OTHER; note = 2'-deoxy-2'-fluoroadenosine-3'-phosphate
  modified_base 12: mod_base = OTHER; note = 2'-O-methyluridine-3'-phosphate
  modified_base 13: mod_base = OTHER; note = 2'-O-methylguanosine-3'-phosphate
  modified_base 14: mod_base = OTHER; note = 2'-O-methyluridine-3'-phosphate
  modified_base 15: mod_base = OTHER; note = 2'-O-methyladenosine-3'-phosphate
  modified_base 16: mod_base = OTHER; note = 2'-O-methyluridine-3'-phosphate
  modified_base 17: mod_base = OTHER; note = 2'-O-methyluridine-3'-phosphate
  modified_base 18: mod_base = OTHER; note = 2'-O-methylcytidine-3'-phosphate
  modified_base 19: mod_base = OTHER; note = 2'-O-methyladenosine-3'-phosphate
  modified_base 20: mod_base = OTHER; note = 2'-O-methyluridine-3'-phosphate
  modified_base 21: mod_base = OTHER; note = 2'-O-methyladenosine-3'-phosphate ((2S,4R)-1-[29-[[2-(acetylamino)-2-deoxy-beta-D-galactopyra nosyl]oxy]-14,14-bis[[3-[[3-[[5-[[2-(acetylamino)-2-deoxy-b eta-D-galactopyranosyl]oxy]-1-oxopentyl]amino]propyl]amino] -3-oxopropoxy]methyl]-1,12,19,25-tetraoxo-16-oxa-13,20,24-t riazanonacos-1-yl]-4-hydroxy-2-pyrrolidinyl)methyl ester
ttagccatggatgtattcata

SEQ ID NO: 274 - RNA, 21 nt, synthetic construct
  source 1..21: mol_type = other RNA
  modified_base 1: mod_base = OTHER; note = 2'-O-methyladenosine-3'-phosphorothioate
  modified_base 2: mod_base = OTHER; note = 2'-O-methyluridine-3'-phosphorothioate
  modified_base 3: mod_base = OTHER; note = 2'-O-methyluridine-3'-phosphate
  modified_base 4: mod_base = OTHER; note = 2'-O-methylcytidine-3'-phosphate
  modified_base 5: mod_base = OTHER; note = 2'-O-methyladenosine-3'-phosphate
  modified_base 6: mod_base = OTHER; note = 2'-O-hexadecyl-uridine-3'-phosphate
  modified_base 7: mod_base = OTHER; note = 2'-O-methylguanosine-3'-phosphate
  modified_base 8: mod_base = OTHER; note = 2'-O-methyladenosine-3'-phosphate
  modified_base 9: mod_base = OTHER; note = 2'-deoxy-2'-fluoroadenosine-3'-phosphate
  modified_base 10: mod_base = OTHER; note = 2'-deoxy-2'-fluoroadenosine-3'-phosphate
  modified_base 11: mod_base = OTHER; note = 2'-deoxy-2'-fluoroguanosine-3'-phosphate
  modified_base 12: mod_base = OTHER; note = 2'-O-methylguanosine-3'-phosphate
  modified_base 13: mod_base = OTHER; note = 2'-O-methyladenosine-3'-phosphate
  modified_base 14: mod_base = OTHER; note = 2'-O-methylcytidine-3'-phosphate
  modified_base 15: mod_base = OTHER; note = 2'-O-methyluridine-3'-phosphate
  modified_base 16: mod_base = OTHER; note = 2'-O-methyluridine-3'-phosphate
  modified_base 17: mod_base = OTHER; note = 2'-O-methyluridine-3'-phosphate
  modified_base 18: mod_base = OTHER; note = 2'-O-methylcytidine-3'-phosphate
  modified_base 19: mod_base = OTHER; note = 2'-O-methyladenosine-3'-phosphate
  modified_base 20: mod_base = OTHER; note = 2'-O-methyladenosine-3'-phosphate
  modified_base 21: mod_base = OTHER; note = 2'-O-methyladenosine-3'-phosphate ((2S,4R)-1-[29-[[2-(acetylamino)-2-deoxy-beta-D-galactopyra nosyl]oxy]-14,14-bis[[3-[[3-[[5-[[2-(acetylamino)-2-deoxy-b eta-D-galactopyranosyl]oxy]-1-oxopentyl]amino]propyl]amino] -3-oxopropoxy]methyl]-1,12,19,25-tetraoxo-16-oxa-13,20,24-t riazanonacos-1-yl]-4-hydroxy-2-pyrrolidinyl)methyl ester
attcatgaaaggactttcaaa

SEQ ID NO: 275 - RNA, 21 nt, synthetic construct
  source 1..21: mol_type = other RNA
  modified_base 1: mod_base = OTHER; note = 2'-O-methyluridine-3'-phosphorothioate
  modified_base 2: mod_base = OTHER; note = 2'-O-methylcytidine-3'-phosphorothioate
  modified_base 3: mod_base = OTHER; note = 2'-O-methyladenosine-3'-phosphate
  modified_base 4: mod_base = OTHER; note = 2'-O-methyluridine-3'-phosphate
  modified_base 5: mod_base = OTHER; note = 2'-O-methylguanosine-3'-phosphate
  modified_base 6: mod_base = OTHER; note = 2'-O-hexadecyl-adenosine-3'-phosphate
  modified_base 7: mod_base = OTHER; note = 2'-O-methyladenosine-3'-phosphate
  modified_base 8: mod_base = OTHER; note = 2'-O-methyladenosine-3'-phosphate
  modified_base 9: mod_base = OTHER; note = 2'-deoxy-2'-fluoroguanosine-3'-phosphate
  modified_base 10: mod_base = OTHER; note = 2'-deoxy-2'-fluoroguanosine-3'-phosphate
  modified_base 11: mod_base = OTHER; note = 2'-deoxy-2'-fluoroadenosine-3'-phosphate
  modified_base 12: mod_base = OTHER; note = 2'-O-methylcytidine-3'-phosphate
  modified_base 13: mod_base = OTHER; note = 2'-O-methyluridine-3'-phosphate
  modified_base 14: mod_base = OTHER; note = 2'-O-methyluridine-3'-phosphate
  modified_base 15: mod_base = OTHER; note = 2'-O-methyluridine-3'-phosphate
  modified_base 16: mod_base = OTHER; note = 2'-O-methylcytidine-3'-phosphate
  modified_base 17: mod_base = OTHER; note = 2'-O-methyladenosine-3'-phosphate
  modified_base 18: mod_base = OTHER; note = 2'-O-methyladenosine-3'-phosphate
  modified_base 19: mod_base = OTHER; note = 2'-O-methyladenosine-3'-phosphate
  modified_base 20: mod_base = OTHER; note = 2'-O-methylguanosine-3'-phosphate
  modified_base 21: mod_base = OTHER; note = 2'-O-methyladenosine-3'-phosphate ((2S,4R)-1-[29-[[2-(acetylamino)-2-deoxy-beta-D-galactopyra nosyl]oxy]-14,14-bis[[3-[[3-[[5-[[2-(acetylamino)-2-deoxy-b eta-D-galactopyranosyl]oxy]-1-oxopentyl]amino]propyl]amino] -3-oxopropoxy]methyl]-1,12,19,25-tetraoxo-16-oxa-13,20,24-t riazanonacos-1-yl]-4-hydroxy-2-pyrrolidinyl)methyl ester
tcatgaaaggactttcaaaga

SEQ ID NO: 276 - RNA, 21 nt, synthetic construct
  source 1..21: mol_type = other RNA
  modified_base 1: mod_base = OTHER; note = 2'-O-methyladenosine-3'-phosphorothioate
  modified_base 2: mod_base = OTHER; note = 2'-O-methyladenosine-3'-phosphorothioate
  modified_base 3: mod_base = OTHER; note = 2'-O-methylguanosine-3'-phosphate
  modified_base 4: mod_base = OTHER; note = 2'-O-methyladenosine-3'-phosphate
  modified_base 5: mod_base = OTHER; note = 2'-O-methylguanosine-3'-phosphate
  modified_base 6: mod_base = OTHER; note = 2'-O-hexadecyl-cytidine-3'-phosphate
  modified_base 7: mod_base = OTHER; note = 2'-O-methyladenosine-3'-phosphate
  modified_base 8: mod_base = OTHER; note = 2'-O-methyladenosine-3'-phosphate
  modified_base 9: mod_base = OTHER; note = 2'-deoxy-2'-fluoroguanosine-3'-phosphate
  modified_base 10: mod_base = OTHER; note = 2'-deoxy-2'-fluorouridine-3'-phosphate
  modified_base 11: mod_base = OTHER; note = 2'-deoxy-2'-fluoroguanosine-3'-phosphate
  modified_base 12: mod_base = OTHER; note = 2'-O-methyladenosine-3'-phosphate
  modified_base 13: mod_base = OTHER; note = 2'-O-methylcytidine-3'-phosphate
  modified_base 14: mod_base = OTHER; note = 2'-O-methyladenosine-3'-phosphate
  modified_base 15: mod_base = OTHER; note = 2'-O-methyladenosine-3'-phosphate
  modified_base 16: mod_base = OTHER; note = 2'-O-methyladenosine-3'-phosphate
  modified_base 17: mod_base = OTHER; note = 2'-O-methyluridine-3'-phosphate
  modified_base 18: mod_base = OTHER; note = 2'-O-methylguanosine-3'-phosphate
  modified_base 19: mod_base = OTHER; note = 2'-O-methyluridine-3'-phosphate
  modified_base 20: mod_base = OTHER; note = 2'-O-methyluridine-3'-phosphate
  modified_base 21: mod_base = OTHER; note = 2'-O-methyladenosine-3'-phosphate ((2S,4R)-1-[29-[[2-(acetylamino)-2-deoxy-beta-D-galactopyra nosyl]oxy]-14,14-bis[[3-[[3-[[5-[[2-(acetylamino)-2-deoxy-b eta-D-galactopyranosyl]oxy]-1-oxopentyl]amino]propyl]amino] -3-oxopropoxy]methyl]-1,12,19,25-tetraoxo-16-oxa-13,20,24-t riazanonacos-1-yl]-4-hydroxy-2-pyrrolidinyl)methyl ester
aagagcaagtgacaaatgtta

SEQ ID NO: 277 - RNA, 21 nt, synthetic construct
  source 1..21: mol_type = other RNA
  modified_base 1: mod_base = OTHER; note = 2'-O-methylguanosine-3'-phosphorothioate
  modified_base 2: mod_base = OTHER; note = 2'-O-methyladenosine-3'-phosphorothioate
  modified_base 3: mod_base = OTHER; note = 2'-O-methylguanosine-3'-phosphate
  modified_base 4: mod_base = OTHER; note = 2'-O-methylcytidine-3'-phosphate
  modified_base 5: mod_base = OTHER; note = 2'-O-methyladenosine-3'-phosphate
  modified_base 6: mod_base = OTHER; note = 2'-O-hexadecyl-adenosine-3'-phosphate
  modified_base 7: mod_base = OTHER; note = 2'-O-methylguanosine-3'-phosphate
  modified_base 8: mod_base = OTHER; note = 2'-O-methyluridine-3'-phosphate
  modified_base 9: mod_base = OTHER; note = 2'-deoxy-2'-fluoroguanosine-3'-phosphate
  modified_base 10: mod_base = OTHER; note = 2'-deoxy-2'-fluoroadenosine-3'-phosphate
  modified_base 11: mod_base = OTHER; note = 2'-deoxy-2'-fluorocytidine-3'-phosphate
  modified_base 12: mod_base = OTHER; note = 2'-O-methyladenosine-3'-phosphate
  modified_base 13: mod_base = OTHER; note = 2'-O-methyladenosine-3'-phosphate
  modified_base 14: mod_base = OTHER; note = 2'-O-methyladenosine-3'-phosphate
  modified_base 15: mod_base = OTHER; note = 2'-O-methyluridine-3'-phosphate
  modified_base 16: mod_base = OTHER; note = 2'-O-methylguanosine-3'-phosphate
  modified_base 17: mod_base = OTHER; note = 2'-O-methyluridine-3'-phosphate
  modified_base 18: mod_base = OTHER; note = 2'-O-methyluridine-3'-phosphate
  modified_base 19: mod_base = OTHER; note = 2'-O-methylguanosine-3'-phosphate
  modified_base 20: mod_base = OTHER; note = 2'-O-methylguanosine-3'-phosphate
  modified_base 21: mod_base = OTHER; note = 2'-O-methyladenosine-3'-phosphate ((2S,4R)-1-[29-[[2-(acetylamino)-2-deoxy-beta-D-galactopyra nosyl]oxy]-14,14-bis[[3-[[3-[[5-[[2-(acetylamino)-2-deoxy-b eta-D-galactopyranosyl]oxy]-1-oxopentyl]amino]propyl]amino] -3-oxopropoxy]methyl]-1,12,19,25-tetraoxo-16-oxa-13,20,24-t riazanonacos-1-yl]-4-hydroxy-2-pyrrolidinyl)methyl ester
gagcaagtgacaaatgttgga

SEQ ID NO: 278 - RNA, 21 nt, synthetic construct
  source 1..21: mol_type = other RNA
  modified_base 1: mod_base = OTHER; note = 2'-O-methyladenosine-3'-phosphorothioate
  modified_base 2: mod_base = OTHER; note = 2'-O-methyladenosine-3'-phosphorothioate
  modified_base 3: mod_base = OTHER; note = 2'-O-methylguanosine-3'-phosphate
  modified_base 4: mod_base = OTHER; note = 2'-O-methylguanosine-3'-phosphate
  modified_base 5: mod_base = OTHER; note = 2'-O-methylguanosine-3'-phosphate
  modified_base 6: mod_base = OTHER; note = 2'-O-hexadecyl-uridine-3'-phosphate
  modified_base 7: mod_base = OTHER; note = 2'-O-methyladenosine-3'-phosphate
  modified_base 8: mod_base = OTHER; note = 2'-O-methyluridine-3'-phosphate
  modified_base 9: mod_base = OTHER; note = 2'-deoxy-2'-fluorocytidine-3'-phosphate
  modified_base 10: mod_base = OTHER; note = 2'-deoxy-2'-fluoroadenosine-3'-phosphate
  modified_base 11: mod_base = OTHER; note = 2'-deoxy-2'-fluoroadenosine-3'-phosphate
  modified_base 12: mod_base = OTHER; note = 2'-O-methylguanosine-3'-phosphate
  modified_base 13: mod_base = OTHER; note = 2'-O-methyladenosine-3'-phosphate
  modified_base 14: mod_base = OTHER; note = 2'-O-methylcytidine-3'-phosphate
  modified_base 15: mod_base = OTHER; note = 2'-O-methyluridine-3'-phosphate
  modified_base 16: mod_base = OTHER; note = 2'-O-methyladenosine-3'-phosphate
  modified_base 17: mod_base = OTHER; note = 2'-O-methylcytidine-3'-phosphate
  modified_base 18: mod_base = OTHER; note = 2'-O-methylguanosine-3'-phosphate
  modified_base 19: mod_base = OTHER; note = 2'-O-methyladenosine-3'-phosphate
  modified_base 20: mod_base = OTHER; note = 2'-O-methyladenosine-3'-phosphate
  modified_base 21: mod_base = OTHER; note = 2'-O-methyladenosine-3'-phosphate ((2S,4R)-1-[29-[[2-(acetylamino)-2-deoxy-beta-D-galactopyra nosyl]oxy]-14,14-bis[[3-[[3-[[5-[[2-(acetylamino)-2-deoxy-b eta-D-galactopyranosyl]oxy]-1-oxopentyl]amino]propyl]amino] -3-oxopropoxy]methyl]-1,12,19,25-tetraoxo-16-oxa-13,20,24-t riazanonacos-1-yl]-4-hydroxy-2-pyrrolidinyl)methyl ester
aagggtatcaagactacgaaa

SEQ ID NO: 279 - RNA, 21 nt, synthetic construct
  source 1..21: mol_type = other RNA
  modified_base 1: mod_base = OTHER; note = 2'-O-methylcytidine-3'-phosphorothioate
  modified_base 2: mod_base = OTHER; note = 2'-O-methyluridine-3'-phosphorothioate
  modified_base 3: mod_base = OTHER; note = 2'-O-methylguanosine-3'-phosphate
  modified_base 4: mod_base = OTHER; note = 2'-O-methyladenosine-3'-phosphate
  modified_base 5: mod_base = OTHER; note = 2'-O-methyladenosine-3'-phosphate
  modified_base 6: mod_base = OTHER; note = 2'-O-hexadecyl-guanosine-3'-phosphate
  modified_base 7: mod_base = OTHER; note = 2'-O-methylcytidine-3'-phosphate
  modified_base 8: mod_base = OTHER; note = 2'-O-methylcytidine-3'-phosphate
  modified_base 9: mod_base = OTHER; note = 2'-deoxy-2'-fluorouridine-3'-phosphate
  modified_base 10: mod_base = OTHER; note = 2'-deoxy-2'-fluoroadenosine-3'-phosphate
  modified_base 11: mod_base = OTHER; note = 2'-deoxy-2'-fluoroadenosine-3'-phosphate
  modified_base 12: mod_base = OTHER; note = 2'-O-methylguanosine-3'-phosphate
  modified_base 13: mod_base = OTHER; note = 2'-O-methyladenosine-3'-phosphate
  modified_base 14: mod_base = OTHER; note = 2'-O-methyladenosine-3'-phosphate
  modified_base 15: mod_base = OTHER; note = 2'-O-methyladenosine-3'-phosphate
  modified_base 16: mod_base = OTHER; note = 2'-O-methyluridine-3'-phosphate
  modified_base 17: mod_base = OTHER; note = 2'-O-methyladenosine-3'-phosphate
  modified_base 18: mod_base = OTHER; note = 2'-O-methyluridine-3'-phosphate
  modified_base 19: mod_base = OTHER; note = 2'-O-methylcytidine-3'-phosphate
  modified_base 20: mod_base = OTHER; note = 2'-O-methyluridine-3'-phosphate
  modified_base 21: mod_base = OTHER; note = 2'-O-methyladenosine-3'-phosphate ((2S,4R)-1-[29-[[2-(acetylamino)-2-deoxy-beta-D-galactopyra nosyl]oxy]-14,14-bis[[3-[[3-[[5-[[2-(acetylamino)-2-deoxy-b eta-D-galactopyranosyl]oxy]-1-oxopentyl]amino]propyl]amino] -3-oxopropoxy]methyl]-1,12,19,25-tetraoxo-16-oxa-13,20,24-t riazanonacos-1-yl]-4-hydroxy-2-pyrrolidinyl)methyl ester
ctgaagcctaagaaatatcta

SEQ ID NO: 280 - RNA, 21 nt, synthetic construct
  source 1..21: mol_type = other RNA
  modified_base 1: mod_base = OTHER; note = 2'-O-methyluridine-3'-phosphorothioate
  modified_base 2: mod_base = OTHER; note = 2'-O-methylguanosine-3'-phosphorothioate
  modified_base 3: mod_base = OTHER; note = 2'-O-methyladenosine-3'-phosphate
  modified_base 4: mod_base = OTHER; note = 2'-O-methyladenosine-3'-phosphate
  modified_base 5: mod_base = OTHER; note = 2'-O-methylguanosine-3'-phosphate
  modified_base 6: mod_base = OTHER; note = 2'-O-hexadecyl-cytidine-3'-phosphate
  modified_base 7: mod_base = OTHER; note = 2'-O-methylcytidine-3'-phosphate
  modified_base 8: mod_base = OTHER; note = 2'-O-methyluridine-3'-phosphate
  modified_base 9: mod_base = OTHER; note = 2'-deoxy-2'-fluoroadenosine-3'-phosphate
  modified_base 10: mod_base = OTHER; note = 2'-deoxy-2'-fluoroadenosine-3'-phosphate
  modified_base 11: mod_base = OTHER; note = 2'-deoxy-2'-fluoroguanosine-3'-phosphate
  modified_base 12: mod_base = OTHER; note = 2'-O-methyladenosine-3'-phosphate
  modified_base 13: mod_base = OTHER; note = 2'-O-methyladenosine-3'-phosphate
  modified_base 14: mod_base = OTHER; note = 2'-O-methyladenosine-3'-phosphate
  modified_base 15: mod_base = OTHER; note = 2'-O-methyluridine-3'-phosphate
  modified_base 16: mod_base = OTHER; note = 2'-O-methyladenosine-3'-phosphate
  modified_base 17: mod_base = OTHER; note = 2'-O-methyluridine-3'-phosphate
  modified_base 18: mod_base = OTHER; note = 2'-O-methylcytidine-3'-phosphate
  modified_base 19: mod_base = OTHER; note = 2'-O-methyluridine-3'-phosphate
  modified_base 20: mod_base = OTHER; note = 2'-O-methyluridine-3'-phosphate
  modified_base 21: mod_base = OTHER; note = 2'-O-methyladenosine-3'-phosphate ((2S,4R)-1-[29-[[2-(acetylamino)-2-deoxy-beta-D-galactopyra nosyl]oxy]-14,14-bis[[3-[[3-[[5-[[2-(acetylamino)-2-deoxy-b eta-D-galactopyranosyl]oxy]-1-oxopentyl]amino]propyl]amino] -3-oxopropoxy]methyl]-1,12,19,25-tetraoxo-16-oxa-13,20,24-t riazanonacos-1-yl]-4-hydroxy-2-pyrrolidinyl)methyl ester
tgaagcctaagaaatatctta

SEQ ID NO: 281 - RNA, 21 nt, synthetic construct
  source 1..21: mol_type = other RNA
  modified_base 1: mod_base = OTHER; note = 2'-O-methyladenosine-3'-phosphorothioate
  modified_base 2: mod_base = OTHER; note = 2'-O-methyladenosine-3'-phosphorothioate
  modified_base 3: mod_base = OTHER; note = 2'-O-methylguanosine-3'-phosphate
  modified_base 4: mod_base = OTHER; note = 2'-O-methylcytidine-3'-phosphate
  modified_base 5: mod_base = OTHER; note = 2'-O-methylcytidine-3'-phosphate
  modified_base 6: mod_base = OTHER; note = 2'-O-hexadecyl-uridine-3'-phosphate
  modified_base 7: mod_base = OTHER; note = 2'-O-methyladenosine-3'-phosphate
  modified_base 8: mod_base = OTHER; note = 2'-O-methyladenosine-3'-phosphate
  modified_base 9: mod_base = OTHER; note = 2'-deoxy-2'-fluoroguanosine-3'-phosphate
  modified_base 10: mod_base = OTHER; note = 2'-deoxy-2'-fluoroadenosine-3'-phosphate
  modified_base 11: mod_base = OTHER; note = 2'-deoxy-2'-fluoroadenosine-3'-phosphate
  modified_base 12: mod_base = OTHER; note = 2'-O-methyladenosine-3'-phosphate
  modified_base 13: mod_base = OTHER; note = 2'-O-methyluridine-3'-phosphate
  modified_base 14: mod_base = OTHER; note = 2'-O-methyladenosine-3'-phosphate
  modified_base 15: mod_base = OTHER; note = 2'-O-methyluridine-3'-phosphate
  modified_base 16: mod_base = OTHER; note = 2'-O-methylcytidine-3'-phosphate
  modified_base 17: mod_base = OTHER; note = 2'-O-methyluridine-3'-phosphate
  modified_base 18: mod_base = OTHER; note = 2'-O-methyluridine-3'-phosphate
  modified_base 19: mod_base = OTHER; note = 2'-O-methyluridine-3'-phosphate
  modified_base 20: mod_base = OTHER; note = 2'-O-methylguanosine-3'-phosphate
  modified_base 21: mod_base = OTHER; note = 2'-O-methyladenosine-3'-phosphate ((2S,4R)-1-[29-[[2-(acetylamino)-2-deoxy-beta-D-galactopyra nosyl]oxy]-14,14-bis[[3-[[3-[[5-[[2-(acetylamino)-2-deoxy-b eta-D-galactopyranosyl]oxy]-1-oxopentyl]amino]propyl]amino] -3-oxopropoxy]methyl]-1,12,19,25-tetraoxo-16-oxa-13,20,24-t riazanonacos-1-yl]-4-hydroxy-2-pyrrolidinyl)methyl ester
aagcctaagaaatatctttga

SEQ ID NO: 282 - RNA, 21 nt, synthetic construct
  source 1..21: mol_type = other RNA
  modified_base 1: mod_base = OTHER; note = 2'-O-methylcytidine-3'-phosphorothioate
  modified_base 2: mod_base = OTHER; note = 2'-O-methylcytidine-3'-phosphorothioate
  modified_base 3: mod_base = OTHER; note = 2'-O-methyluridine-3'-phosphate
  modified_base 4: mod_base = OTHER; note = 2'-O-methyladenosine-3'-phosphate
  modified_base 5: mod_base = OTHER; note = 2'-O-methyladenosine-3'-phosphate
  modified_base 6: mod_base = OTHER; note = 2'-O-hexadecyl-guanosine-3'-phosphate
  modified_base 7: mod_base = OTHER; note = 2'-O-methyladenosine-3'-phosphate
  modified_base 8: mod_base = OTHER; note = 2'-O-methyladenosine-3'-phosphate
  modified_base 9: mod_base = OTHER; note = 2'-deoxy-2'-fluoroadenosine-3'-phosphate
  modified_base 10: mod_base = OTHER; note = 2'-deoxy-2'-fluorouridine-3'-phosphate
  modified_base 11: mod_base = OTHER; note = 2'-deoxy-2'-fluoroadenosine-3'-phosphate
  modified_base 12: mod_base = OTHER; note = 2'-O-methyluridine-3'-phosphate
  modified_base 13: mod_base = OTHER; note = 2'-O-methylcytidine-3'-phosphate
  modified_base 14: mod_base = OTHER; note = 2'-O-methyluridine-3'-phosphate
  modified_base 15: mod_base = OTHER; note = 2'-O-methyluridine-3'-phosphate
  modified_base 16: mod_base = OTHER; note = 2'-O-methyluridine-3'-phosphate
  modified_base 17: mod_base = OTHER; note = 2'-O-methylguanosine-3'-phosphate
  modified_base 18: mod_base = OTHER; note = 2'-O-methylcytidine-3'-phosphate
  modified_base 19: mod_base = OTHER; note = 2'-O-methyluridine-3'-phosphate
  modified_base 20: mod_base = OTHER; note = 2'-O-methylcytidine-3'-phosphate
  modified_base 21: mod_base = OTHER; note = 2'-O-methyladenosine-3'-phosphate ((2S,4R)-1-[29-[[2-(acetylamino)-2-deoxy-beta-D-galactopyra nosyl]oxy]-14,14-bis[[3-[[3-[[5-[[2-(acetylamino)-2-deoxy-b eta-D-galactopyranosyl]oxy]-1-oxopentyl]amino]propyl]amino] -3-oxopropoxy]methyl]-1,12,19,25-tetraoxo-16-oxa-13,20,24-t riazanonacos-1-yl]-4-hydroxy-2-pyrrolidinyl)methyl ester
cctaagaaatatctttgctca

SEQ ID NO: 283 - RNA, 21 nt, synthetic construct
  source 1..21: mol_type = other RNA
  modified_base 1: mod_base = OTHER; note = 2'-O-methyluridine-3'-phosphorothioate
  modified_base 2: mod_base = OTHER; note = 2'-O-methylcytidine-3'-phosphorothioate
  modified_base 3: mod_base = OTHER; note = 2'-O-methyluridine-3'-phosphate
  modified_base 4: mod_base = OTHER; note = 2'-O-methyluridine-3'-phosphate
  modified_base 5: mod_base = OTHER; note = 2'-O-methyluridine-3'-phosphate
  modified_base 6: mod_base = OTHER; note = 2'-O-hexadecyl-guanosine-3'-phosphate
  modified_base 7: mod_base = OTHER; note = 2'-O-methylcytidine-3'-phosphate
  modified_base 8: mod_base = OTHER; note = 2'-O-methyluridine-3'-phosphate
  modified_base 9: mod_base = OTHER; note = 2'-deoxy-2'-fluorocytidine-3'-phosphate
  modified_base 10: mod_base = OTHER; note = 2'-deoxy-2'-fluorocytidine-3'-phosphate
  modified_base 11: mod_base = OTHER; note = 2'-deoxy-2'-fluorocytidine-3'-phosphate
  modified_base 12: mod_base = OTHER; note = 2'-O-methyladenosine-3'-phosphate
  modified_base 13: mod_base = OTHER; note = 2'-O-methylguanosine-3'-phosphate
  modified_base 14: mod_base = OTHER; note = 2'-O-methyluridine-3'-phosphate
  modified_base 15: mod_base = OTHER; note = 2'-O-methyluridine-3'-phosphate
  modified_base 16: mod_base = OTHER; note = 2'-O-methyluridine-3'-phosphate
  modified_base 17: mod_base = OTHER; note = 2'-O-methylcytidine-3'-phosphate
  modified_base 18: mod_base = OTHER; note = 2'-O-methyluridine-3'-phosphate
  modified_base 19: mod_base = OTHER; note = 2'-O-methyluridine-3'-phosphate
  modified_base 20: mod_base = OTHER; note = 2'-O-methylguanosine-3'-phosphate
  modified_base 21: mod_base = OTHER; note = 2'-O-methyladenosine-3'-phosphate ((2S,4R)-1-[29-[[2-(acetylamino)-2-deoxy-beta-D-galactopyra nosyl]oxy]-14,14-bis[[3-[[3-[[5-[[2-(acetylamino)-2-deoxy-b eta-D-galactopyranosyl]oxy]-1-oxopentyl]amino]propyl]amino] -3-oxopropoxy]methyl]-1,12,19,25-tetraoxo-16-oxa-13,20,24-t riazanonacos-1-yl]-4-hydroxy-2-pyrrolidinyl)methyl ester
tctttgctcccagtttcttga

SEQ ID NO: 284 - RNA, 21 nt, synthetic construct
  source 1..21: mol_type = other RNA
  modified_base 1: mod_base = OTHER; note = 2'-O-methylcytidine-3'-phosphorothioate
  modified_base 2: mod_base = OTHER; note = 2'-O-methyluridine-3'-phosphorothioate
  modified_base 3: mod_base = OTHER; note = 2'-O-methyluridine-3'-phosphate
  modified_base 4: mod_base = OTHER; note = 2'-O-methyluridine-3'-phosphate
  modified_base 5: mod_base = OTHER; note = 2'-O-methylguanosine-3'-phosphate
  modified_base 6: mod_base = OTHER; note = 2'-O-hexadecyl-cytidine-3'-phosphate
  modified_base 7: mod_base = OTHER; note = 2'-O-methyluridine-3'-phosphate
  modified_base 8: mod_base = OTHER; note = 2'-O-methylcytidine-3'-phosphate
  modified_base 9: mod_base = OTHER; note = 2'-deoxy-2'-fluorocytidine-3'-phosphate
  modified_base 10: mod_base = OTHER; note = 2'-deoxy-2'-fluorocytidine-3'-phosphate
  modified_base 11: mod_base = OTHER; note = 2'-deoxy-2'-fluoroadenosine-3'-phosphate
  modified_base 12: mod_base = OTHER; note = 2'-O-methylguanosine-3'-phosphate
  modified_base 13: mod_base = OTHER; note = 2'-O-methyluridine-3'-phosphate
  modified_base 14: mod_base = OTHER; note = 2'-O-methyluridine-3'-phosphate
  modified_base 15: mod_base = OTHER; note = 2'-O-methyluridine-3'-phosphate
  modified_base 16: mod_base = OTHER; note = 2'-O-methylcytidine-3'-phosphate
  modified_base 17: mod_base = OTHER; note = 2'-O-methyluridine-3'-phosphate
  modified_base 18: mod_base = OTHER; note = 2'-O-methyluridine-3'-phosphate
  modified_base 19: mod_base = OTHER; note = 2'-O-methylguanosine-3'-phosphate
  modified_base 20: mod_base = OTHER; note = 2'-O-methyladenosine-3'-phosphate
  modified_base 21: mod_base = OTHER; note = 2'-O-methyladenosine-3'-phosphate ((2S,4R)-1-[29-[[2-(acetylamino)-2-deoxy-beta-D-galactopyra nosyl]oxy]-14,14-bis[[3-[[3-[[5-[[2-(acetylamino)-2-deoxy-b eta-D-galactopyranosyl]oxy]-1-oxopentyl]amino]propyl]amino] -3-oxopropoxy]methyl]-1,12,19,25-tetraoxo-16-oxa-13,20,24-t riazanonacos-1-yl]-4-hydroxy-2-pyrrolidinyl)methyl ester
ctttgctcccagtttcttgaa

SEQ ID NO: 285 - RNA, 21 nt, synthetic construct
  source 1..21: mol_type = other RNA
  modified_base 1: mod_base = OTHER; note = 2'-O-methyluridine-3'-phosphorothioate
  modified_base 2: mod_base = OTHER; note = 2'-O-methyluridine-3'-phosphorothioate
  modified_base 3: mod_base = OTHER; note = 2'-O-methyluridine-3'-phosphate
  modified_base 4: mod_base = OTHER; note = 2'-O-methylguanosine-3'-phosphate
  modified_base 5: mod_base = OTHER; note = 2'-O-methylcytidine-3'-phosphate
  modified_base 6: mod_base = OTHER; note = 2'-O-hexadecyl-uridine-3'-phosphate
  modified_base 7: mod_base = OTHER; note = 2'-O-methylcytidine-3'-phosphate
  modified_base 8: mod_base = OTHER; note = 2'-O-methylcytidine-3'-phosphate
  modified_base 9: mod_base = OTHER; note = 2'-deoxy-2'-fluorocytidine-3'-phosphate
  modified_base 10: mod_base = OTHER; note = 2'-deoxy-2'-fluoroadenosine-3'-phosphate
  modified_base 11: mod_base = OTHER; note = 2'-deoxy-2'-fluoroguanosine-3'-phosphate
  modified_base 12: mod_base = OTHER; note = 2'-O-methyluridine-3'-phosphate
  modified_base 13: mod_base = OTHER; note = 2'-O-methyluridine-3'-phosphate
  modified_base 14: mod_base = OTHER; note = 2'-O-methyluridine-3'-phosphate
  modified_base 15: mod_base = OTHER; note = 2'-O-methylcytidine-3'-phosphate
  modified_base 16: mod_base = OTHER; note = 2'-O-methyluridine-3'-phosphate
  modified_base 17: mod_base = OTHER; note = 2'-O-methyluridine-3'-phosphate
  modified_base 18: mod_base = OTHER; note = 2'-O-methylguanosine-3'-phosphate
  modified_base 19: mod_base = OTHER; note = 2'-O-methyladenosine-3'-phosphate
  modified_base 20: mod_base = OTHER; note = 2'-O-methylguanosine-3'-phosphate
  modified_base 21: mod_base = OTHER; note = 2'-O-methyladenosine-3'-phosphate ((2S,4R)-1-[29-[[2-(acetylamino)-2-deoxy-beta-D-galactopyra nosyl]oxy]-14,14-bis[[3-[[3-[[5-[[2-(acetylamino)-2-deoxy-b eta-D-galactopyranosyl]oxy]-1-oxopentyl]amino]propyl]amino] -3-oxopropoxy]methyl]-1,12,19,25-tetraoxo-16-oxa-13,20,24-t riazanonacos-1-yl]-4-hydroxy-2-pyrrolidinyl)methyl ester
tttgctcccagtttcttgaga

SEQ ID NO: 286 - RNA, 21 nt, synthetic construct
  source 1..21: mol_type = other RNA
  modified_base 1: mod_base = OTHER; note = 2'-O-methyluridine-3'-phosphorothioate
  modified_base 2: mod_base = OTHER; note = 2'-O-methylcytidine-3'-phosphorothioate
  modified_base 3: mod_base = OTHER; note = 2'-O-methylcytidine-3'-phosphate
  modified_base 4: mod_base = OTHER; note = 2'-O-methylcytidine-3'-phosphate
  modified_base 5: mod_base = OTHER; note = 2'-O-methyladenosine-3'-phosphate
  modified_base 6: mod_base = OTHER; note = 2'-O-hexadecyl-guanosine-3'-phosphate
  modified_base 7: mod_base = OTHER; note = 2'-O-methyluridine-3'-phosphate
  modified_base 8: mod_base = OTHER; note = 2'-O-methyluridine-3'-phosphate
  modified_base 9: mod_base = OTHER; note = 2'-deoxy-2'-fluorouridine-3'-phosphate
  modified_base 10: mod_base = OTHER; note = 2'-deoxy-2'-fluorocytidine-3'-phosphate
  modified_base 11: mod_base = OTHER; note = 2'-deoxy-2'-fluorouridine-3'-phosphate
  modified_base 12: mod_base = OTHER; note = 2'-O-methyluridine-3'-phosphate
  modified_base 13: mod_base = OTHER; note = 2'-O-methylguanosine-3'-phosphate
  modified_base 14: mod_base = OTHER; note = 2'-O-methyladenosine-3'-phosphate
  modified_base 15: mod_base = OTHER; note = 2'-O-methylguanosine-3'-phosphate
  modified_base 16: mod_base = OTHER; note = 2'-O-methyladenosine-3'-phosphate
  modified_base 17: mod_base = OTHER; note = 2'-O-methyluridine-3'-phosphate
  modified_base 18: mod_base = OTHER; note = 2'-O-methylcytidine-3'-phosphate
  modified_base 19: mod_base = OTHER; note = 2'-O-methyluridine-3'-phosphate
  modified_base 20: mod_base = OTHER; note = 2'-O-methylguanosine-3'-phosphate
  modified_base 21: mod_base = OTHER; note = 2'-O-methyladenosine-3'-phosphate ((2S,4R)-1-[29-[[2-(acetylamino)-2-deoxy-beta-D-galactopyra nosyl]oxy]-14,14-bis[[3-[[3-[[5-[[2-(acetylamino)-2-deoxy-b eta-D-galactopyranosyl]oxy]-1-oxopentyl]amino]propyl]amino] -3-oxopropoxy]methyl]-1,12,19,25-tetraoxo-16-oxa-13,20,24-t riazanonacos-1-yl]-4-hydroxy-2-pyrrolidinyl)methyl ester
tcccagtttcttgagatctga

SEQ ID NO: 287 - RNA, 21 nt, synthetic construct
  source 1..21: mol_type = other RNA
  modified_base 1: mod_base = OTHER; note = 2'-O-methyladenosine-3'-phosphorothioate
  modified_base 2: mod_base = OTHER; note = 2'-O-methyladenosine-3'-phosphorothioate
  modified_base 3: mod_base = OTHER; note = 2'-O-methylguanosine-3'-phosphate
  modified_base 4: mod_base = OTHER; note = 2'-O-methyluridine-3'-phosphate
  modified_base 5: mod_base = OTHER; note = 2'-O-methylguanosine-3'-phosphate
  modified_base 6: mod_base = OTHER; note = 2'-O-hexadecyl-cytidine-3'-phosphate
  modified_base 7: mod_base = OTHER; note = 2'-O-methyluridine-3'-phosphate
  modified_base 8: mod_base = OTHER; note = 2'-O-methylcytidine-3'-phosphate
  modified_base 9: mod_base = OTHER; note = 2'-deoxy-2'-fluoroadenosine-3'-phosphate
  modified_base 10: mod_base = OTHER; note = 2'-deoxy-2'-fluoroguanosine-3'-phosphate
  modified_base 11: mod_base = OTHER; note = 2'-deoxy-2'-fluorouridine-3'-phosphate
  modified_base 12: mod_base = OTHER; note = 2'-O-methyluridine-3'-phosphate
  modified_base 13: mod_base = OTHER; note = 2'-O-methylcytidine-3'-phosphate
  modified_base 14: mod_base = OTHER; note = 2'-O-methylcytidine-3'-phosphate
  modified_base 15: mod_base = OTHER; note = 2'-O-methyladenosine-3'-phosphate
  modified_base 16: mod_base = OTHER; note = 2'-O-methyladenosine-3'-phosphate
  modified_base 17: mod_base = OTHER; note = 2'-O-methyluridine-3'-phosphate
  modified_base 18: mod_base = OTHER; note = 2'-O-methylguanosine-3'-phosphate
  modified_base 19: mod_base = OTHER; note = 2'-O-methyluridine-3'-phosphate
  modified_base 20: mod_base = OTHER; note = 2'-O-methylguanosine-3'-phosphate
  modified_base 21: mod_base = OTHER; note = 2'-O-methyladenosine-3'-phosphate ((2S,4R)-1-[29-[[2-(acetylamino)-2-deoxy-beta-D-galactopyra nosyl]oxy]-14,14-bis[[3-[[3-[[5-[[2-(acetylamino)-2-deoxy-b eta-D-galactopyranosyl]oxy]-1-oxopentyl]amino]propyl]amino] -3-oxopropoxy]methyl]-1,12,19,25-tetraoxo-16-oxa-13,20,24-t riazanonacos-1-yl]-4-hydroxy-2-pyrrolidinyl)methyl ester
aagtgctcagttccaatgtga

SEQ ID NO: 288 - RNA, 21 nt, synthetic construct
  source 1..21: mol_type = other RNA
  modified_base 1: mod_base = OTHER; note = 2'-O-methyladenosine-3'-phosphorothioate
  modified_base 2: mod_base = OTHER; note = 2'-O-methylguanosine-3'-phosphorothioate
  modified_base 3: mod_base = OTHER; note = 2'-O-methyluridine-3'-phosphate
  modified_base 4: mod_base = OTHER; note = 2'-O-methylguanosine-3'-phosphate
  modified_base 5: mod_base = OTHER; note = 2'-O-methylcytidine-3'-phosphate
  modified_base 6: mod_base = OTHER; note = 2'-O-hexadecyl-uridine-3'-phosphate
  modified_base 7: mod_base = OTHER; note = 2'-O-methylcytidine-3'-phosphate
  modified_base 8: mod_base = OTHER; note = 2'-O-methyladenosine-3'-phosphate
  modified_base 9: mod_base = OTHER; note = 2'-deoxy-2'-fluoroguanosine-3'-phosphate
  modified_base 10: mod_base = OTHER; note = 2'-deoxy-2'-fluorouridine-3'-phosphate
  modified_base 11: mod_base = OTHER; note = 2'-deoxy-2'-fluorouridine-3'-phosphate
  modified_base 12: mod_base = OTHER; note = 2'-O-methylcytidine-3'-phosphate
  modified_base 13: mod_base = OTHER; note = 2'-O-methylcytidine-3'-phosphate
  modified_base 14: mod_base = OTHER; note = 2'-O-methyladenosine-3'-phosphate
  modified_base 15: mod_base = OTHER; note = 2'-O-methyladenosine-3'-phosphate
  modified_base 16: mod_base = OTHER; note = 2'-O-methyluridine-3'-phosphate
  modified_base 17: mod_base = OTHER; note = 2'-O-methylguanosine-3'-phosphate
  modified_base 18: mod_base = OTHER; note = 2'-O-methyluridine-3'-phosphate
  modified_base 19: mod_base = OTHER; note = 2'-O-methylguanosine-3'-phosphate
  modified_base 20: mod_base = OTHER; note = 2'-O-methylcytidine-3'-phosphate
  modified_base 21: mod_base = OTHER; note = 2'-O-methyladenosine-3'-phosphate ((2S,4R)-1-[29-[[2-(acetylamino)-2-deoxy-beta-D-galactopyra nosyl]oxy]-14,14-bis[[3-[[3-[[5-[[2-(acetylamino)-2-deoxy-b eta-D-galactopyranosyl]oxy]-1-oxopentyl]amino]propyl]amino] -3-oxopropoxy]methyl]-1,12,19,25-tetraoxo-16-oxa-13,20,24-t riazanonacos-1-yl]-4-hydroxy-2-pyrrolidinyl)methyl ester
agtgctcagttccaatgtgca

SEQ ID NO: 289 - RNA, 21 nt, synthetic construct
  source 1..21: mol_type = other RNA
  modified_base 1: mod_base = OTHER; note = 2'-O-methyluridine-3'-phosphorothioate
  modified_base 2: mod_base = OTHER; note = 2'-O-methylguanosine-3'-phosphorothioate
  modified_base 3: mod_base = OTHER; note = 2'-O-methylcytidine-3'-phosphate
  modified_base 4: mod_base = OTHER; note = 2'-O-methylcytidine-3'-phosphate
  modified_base 5: mod_base = OTHER; note = 2'-O-methylcytidine-3'-phosphate
  modified_base 6: mod_base = OTHER; note = 2'-O-hexadecyl-adenosine-3'-phosphate
  modified_base 7: mod_base = OTHER; note = 2'-O-methylguanosine-3'-phosphate
  modified_base 8: mod_base = OTHER; note = 2'-O-methyluridine-3'-phosphate
  modified_base 9: mod_base = OTHER; note = 2'-deoxy-2'-fluorocytidine-3'-phosphate
  modified_base 10: mod_base = OTHER; note = 2'-deoxy-2'-fluoroadenosine-3'-phosphate
  modified_base 11: mod_base = OTHER; note = 2'-deoxy-2'-fluorouridine-3'-phosphate
  modified_base 12: mod_base = OTHER; note = 2'-O-methylguanosine-3'-phosphate
  modified_base 13: mod_base = OTHER; note = 2'-O-methyladenosine-3'-phosphate
  modified_base 14: mod_base = OTHER; note = 2'-O-methylcytidine-3'-phosphate
  modified_base 15: mod_base = OTHER; note = 2'-O-methyladenosine-3'-phosphate
  modified_base 16: mod_base = OTHER; note = 2'-O-methyluridine-3'-phosphate
  modified_base 17: mod_base = OTHER; note = 2'-O-methyluridine-3'-phosphate
  modified_base 18: mod_base = OTHER; note = 2'-O-methyluridine-3'-phosphate
  modified_base 19: mod_base = OTHER; note = 2'-O-methylcytidine-3'-phosphate
  modified_base 20: mod_base = OTHER; note = 2'-O-methyluridine-3'-phosphate
  modified_base 21: mod_base = OTHER; note = 2'-O-methyladenosine-3'-phosphate ((2S,4R)-1-[29-[[2-(acetylamino)-2-deoxy-beta-D-galactopyra nosyl]oxy]-14,14-bis[[3-[[3-[[5-[[2-(acetylamino)-2-deoxy-b eta-D-galactopyranosyl]oxy]-1-oxopentyl]amino]propyl]amino] -3-oxopropoxy]methyl]-1,12,19,25-tetraoxo-16-oxa-13,20,24-t riazanonacos-1-yl]-4-hydroxy-2-pyrrolidinyl)methyl ester
tgcccagtcatgacatttcta

SEQ ID NO: 290 - RNA, 21 nt, synthetic construct
  source 1..21: mol_type = other RNA
  modified_base 1: mod_base = OTHER; note = 2'-O-methylcytidine-3'-phosphorothioate
  modified_base 2: mod_base = OTHER; note = 2'-O-methylcytidine-3'-phosphorothioate
  modified_base 3: mod_base = OTHER; note = 2'-O-methyladenosine-3'-phosphate
  modified_base 4: mod_base = OTHER; note = 2'-O-methylguanosine-3'-phosphate
  modified_base 5: mod_base = OTHER; note = 2'-O-methyluridine-3'-phosphate
  modified_base 6: mod_base = OTHER; note = 2'-O-hexadecyl-cytidine-3'-phosphate
  modified_base 7: mod_base = OTHER; note = 2'-O-methyladenosine-3'-phosphate
  modified_base 8: mod_base = OTHER; note = 2'-O-methyluridine-3'-phosphate
  modified_base 9: mod_base = OTHER; note = 2'-deoxy-2'-fluoroguanosine-3'-phosphate
  modified_base 10: mod_base = OTHER; note = 2'-deoxy-2'-fluoroadenosine-3'-phosphate
  modified_base 11: mod_base = OTHER; note = 2'-deoxy-2'-fluorocytidine-3'-phosphate
  modified_base 12: mod_base = OTHER; note = 2'-O-methyladenosine-3'-phosphate
  modified_base 13: mod_base = OTHER; note = 2'-O-methyluridine-3'-phosphate
  modified_base 14: mod_base = OTHER; note = 2'-O-methyluridine-3'-phosphate
  modified_base 15: mod_base = OTHER; note = 2'-O-methyluridine-3'-phosphate
  modified_base 16: mod_base = OTHER; note = 2'-O-methylcytidine-3'-phosphate
  modified_base 17: mod_base = OTHER; note = 2'-O-methyluridine-3'-phosphate
  modified_base 18: mod_base = OTHER; note = 2'-O-methylcytidine-3'-phosphate
  modified_base 19: mod_base = OTHER; note = 2'-O-methyladenosine-3'-phosphate
  modified_base 20: mod_base = OTHER; note = 2'-O-methyladenosine-3'-phosphate
  modified_base 21: mod_base = OTHER; note = 2'-O-methyladenosine-3'-phosphate ((2S,4R)-1-[29-[[2-(acetylamino)-2-deoxy-beta-D-galactopyra nosyl]oxy]-14,14-bis[[3-[[3-[[5-[[2-(acetylamino)-2-deoxy-b eta-D-galactopyranosyl]oxy]-1-oxopentyl]amino]propyl]amino] -3-oxopropoxy]methyl]-1,12,19,25-tetraoxo-16-oxa-13,20,24-t riazanonacos-1-yl]-4-hydroxy-2-pyrrolidinyl)methyl ester
ccagtcatgacatttctcaaa

SEQ ID NO: 291 - RNA, 21 nt, synthetic construct
  source 1..21: mol_type = other RNA
  modified_base 1: mod_base = OTHER; note = 2'-O-methylguanosine-3'-phosphorothioate
  modified_base 2: mod_base = OTHER; note = 2'-O-methyluridine-3'-phosphorothioate
  modified_base 3: mod_base = OTHER; note = 2'-O-methylcytidine-3'-phosphate
  modified_base 4: mod_base = OTHER; note = 2'-O-methyladenosine-3'-phosphate
  modified_base 5: mod_base = OTHER; note = 2'-O-methyluridine-3'-phosphate
  modified_base 6: mod_base = OTHER; note = 2'-O-hexadecyl-guanosine-3'-phosphate
  modified_base 7: mod_base = OTHER; note = 2'-O-methyladenosine-3'-phosphate
  modified_base 8: mod_base = OTHER; note = 2'-O-methylcytidine-3'-phosphate
  modified_base 9: mod_base = OTHER; note = 2'-deoxy-2'-fluoroadenosine-3'-phosphate
  modified_base 10: mod_base = OTHER; note = 2'-deoxy-2'-fluorouridine-3'-phosphate
  modified_base 11: mod_base = OTHER; note = 2'-deoxy-2'-fluorouridine-3'-phosphate
  modified_base 12: mod_base = OTHER; note = 2'-O-methyluridine-3'-phosphate
  modified_base 13: mod_base = OTHER; note = 2'-O-methylcytidine-3'-phosphate
  modified_base 14: mod_base = OTHER; note = 2'-O-methyluridine-3'-phosphate
  modified_base 15: mod_base = OTHER; note = 2'-O-methylcytidine-3'-phosphate
  modified_base 16: mod_base = OTHER; note = 2'-O-methyladenosine-3'-phosphate
  modified_base 17: mod_base = OTHER; note = 2'-O-methyladenosine-3'-phosphate
  modified_base 18: mod_base = OTHER; note = 2'-O-methyladenosine-3'-phosphate
  modified_base 19: mod_base = OTHER; note = 2'-O-methylguanosine-3'-phosphate
  modified_base 20: mod_base = OTHER; note = 2'-O-methyluridine-3'-phosphate
  modified_base 21: mod_base = OTHER; note = 2'-O-methyladenosine-3'-phosphate ((2S,4R)-1-[29-[[2-(acetylamino)-2-deoxy-beta-D-galactopyra nosyl]oxy]-14,14-bis[[3-[[3-[[5-[[2-(acetylamino)-2-deoxy-b eta-D-galactopyranosyl]oxy]-1-oxopentyl]amino]propyl]amino] -3-oxopropoxy]methyl]-1,12,19,25-tetraoxo-16-oxa-13,20,24-t riazanonacos-1-yl]-4-hydroxy-2-pyrrolidinyl)methyl ester
gtcatgacatttctcaaagta

SEQ ID NO: 292 - RNA, 21 nt, synthetic construct
  source 1..21: mol_type = other RNA
  modified_base 1: mod_base = OTHER; note = 2'-O-methylcytidine-3'-phosphorothioate
  modified_base 2: mod_base = OTHER; note = 2'-O-methyladenosine-3'-phosphorothioate
  modified_base 3: mod_base = OTHER; note = 2'-O-methyluridine-3'-phosphate
  modified_base 4: mod_base = OTHER; note = 2'-O-methylguanosine-3'-phosphate
  modified_base 5: mod_base = OTHER; note = 2'-O-methyladenosine-3'-phosphate
  modified_base 6: mod_base = OTHER; note = 2'-O-hexadecyl-cytidine-3'-phosphate
  modified_base 7: mod_base = OTHER; note = 2'-O-methyladenosine-3'-phosphate
  modified_base 8: mod_base = OTHER; note = 2'-O-methyluridine-3'-phosphate
  modified_base 9: mod_base = OTHER; note = 2'-deoxy-2'-fluorouridine-3'-phosphate
  modified_base 10: mod_base = OTHER; note = 2'-deoxy-2'-fluorouridine-3'-phosphate
  modified_base 11: mod_base = OTHER; note = 2'-deoxy-2'-fluorocytidine-3'-phosphate
  modified_base 12: mod_base = OTHER; note = 2'-O-methyluridine-3'-phosphate
  modified_base 13: mod_base = OTHER; note = 2'-O-methylcytidine-3'-phosphate
  modified_base 14: mod_base = OTHER; note = 2'-O-methyladenosine-3'-phosphate
  modified_base 15: mod_base = OTHER; note = 2'-O-methyladenosine-3'-phosphate
  modified_base 16: mod_base = OTHER; note = 2'-O-methyladenosine-3'-phosphate
  modified_base 17: mod_base = OTHER; note = 2'-O-methylguanosine-3'-phosphate
  modified_base 18: mod_base = OTHER; note = 2'-O-methyluridine-3'-phosphate
  modified_base 19: mod_base = OTHER; note = 2'-O-methyluridine-3'-phosphate
  modified_base 20: mod_base = OTHER; note = 2'-O-methyluridine-3'-phosphate
  modified_base 21: mod_base = OTHER; note = 2'-O-methyladenosine-3'-phosphate ((2S,4R)-1-[29-[[2-(acetylamino)-2-deoxy-beta-D-galactopyra nosyl]oxy]-14,14-bis[[3-[[3-[[5-[[2-(acetylamino)-2-deoxy-b eta-D-galactopyranosyl]oxy]-1-oxopentyl]amino]propyl]amino] -3-oxopropoxy]methyl]-1,12,19,25-tetraoxo-16-oxa-13,20,24-t riazanonacos-1-yl]-4-hydroxy-2-pyrrolidinyl)methyl ester
catgacatttctcaaagttta

SEQ ID NO: 293 - RNA, 21 nt, synthetic construct
  source 1..21: mol_type = other RNA
  modified_base 1: mod_base = OTHER; note = 2'-O-methyluridine-3'-phosphorothioate
  modified_base 2: mod_base = OTHER; note = 2'-O-methylcytidine-3'-phosphorothioate
  modified_base 3: mod_base = OTHER; note = 2'-O-methyluridine-3'-phosphate
  modified_base 4: mod_base = OTHER; note = 2'-O-methyluridine-3'-phosphate
  modified_base 5: mod_base = OTHER; note = 2'-O-methylcytidine-3'-phosphate
  modified_base 6: mod_base = OTHER; note = 2'-O-hexadecyl-cytidine-3'-phosphate
  modified_base 7: mod_base = OTHER; note = 2'-O-methyladenosine-3'-phosphate
  modified_base 8: mod_base = OTHER; note = 2'-O-methyluridine-3'-phosphate
  modified_base 9: mod_base = OTHER; note = 2'-deoxy-2'-fluorocytidine-3'-phosphate
  modified_base 10: mod_base = OTHER; note = 2'-deoxy-2'-fluoroadenosine-3'-phosphate
  modified_base 11: mod_base = OTHER; note = 2'-deoxy-2'-fluoroguanosine-3'-phosphate
  modified_base 12: mod_base = OTHER; note = 2'-O-methylcytidine-3'-phosphate
  modified_base 13: mod_base = OTHER; note = 2'-O-methyladenosine-3'-phosphate
  modified_base 14: mod_base = OTHER; note = 2'-O-methylguanosine-3'-phosphate
  modified_base 15: mod_base = OTHER; note = 2'-O-methyluridine-3'-phosphate
  modified_base 16: mod_base = OTHER; note = 2'-O-methylguanosine-3'-phosphate
  modified_base 17: mod_base = OTHER; note = 2'-O-methyladenosine-3'-phosphate
  modified_base 18: mod_base = OTHER; note = 2'-O-methyluridine-3'-phosphate
  modified_base 19: mod_base = OTHER; note = 2'-O-methyluridine-3'-phosphate
  modified_base 20: mod_base = OTHER; note = 2'-O-methylguanosine-3'-phosphate
  modified_base 21: mod_base = OTHER; note = 2'-O-methyladenosine-3'-phosphate ((2S,4R)-1-[29-[[2-(acetylamino)-2-deoxy-beta-D-galactopyra nosyl]oxy]-14,14-bis[[3-[[3-[[5-[[2-(acetylamino)-2-deoxy-b eta-D-galactopyranosyl]oxy]-1-oxopentyl]amino]propyl]amino] -3-oxopropoxy]methyl]-1,12,19,25-tetraoxo-16-oxa-13,20,24-t riazanonacos-1-yl]-4-hydroxy-2-pyrrolidinyl)methyl ester
tcttccatcagcagtgattga

SEQ ID NO: 294 - RNA, 21 nt, synthetic construct
  source 1..21: mol_type = other RNA
  modified_base 1: mod_base = OTHER; note = 2'-O-methylcytidine-3'-phosphorothioate
  modified_base 2: mod_base = OTHER; note = 2'-O-methylcytidine-3'-phosphorothioate
  modified_base 3: mod_base = OTHER; note = 2'-O-methyladenosine-3'-phosphate
  modified_base 4: mod_base = OTHER; note = 2'-O-methyluridine-3'-phosphate
  modified_base 5: mod_base = OTHER; note = 2'-O-methylcytidine-3'-phosphate
  modified_base 6: mod_base = OTHER; note = 2'-O-hexadecyl-adenosine-3'-phosphate
  modified_base 7: mod_base = OTHER; note = 2'-O-methylguanosine-3'-phosphate
  modified_base 8: mod_base = OTHER; note = 2'-O-methylcytidine-3'-phosphate
  modified_base 9: mod_base = OTHER; note = 2'-deoxy-2'-fluoroadenosine-3'-phosphate
  modified_base 10: mod_base = OTHER; note = 2'-deoxy-2'-fluoroguanosine-3'-phosphate
  modified_base 11: mod_base = OTHER; note = 2'-deoxy-2'-fluorouridine-3'-phosphate
  modified_base 12: mod_base = OTHER; note = 2'-O-methylguanosine-3'-phosphate
  modified_base 13: mod_base = OTHER; note = 2'-O-methyladenosine-3'-phosphate
  modified_base 14: mod_base = OTHER; note = 2'-O-methyluridine-3'-phosphate
  modified_base 15: mod_base = OTHER; note = 2'-O-methyluridine-3'-phosphate
  modified_base 16: mod_base = OTHER; note = 2'-O-methylguanosine-3'-phosphate
  modified_base 17: mod_base = OTHER; note = 2'-O-methyladenosine-3'-phosphate
  modified_base 18: mod_base = OTHER; note = 2'-O-methyladenosine-3'-phosphate
  modified_base 19: mod_base = OTHER; note = 2'-O-methylguanosine-3'-phosphate
  modified_base 20: mod_base = OTHER; note = 2'-O-methyluridine-3'-phosphate
  modified_base 21: mod_base = OTHER; note = 2'-O-methyladenosine-3'-phosphate ((2S,4R)-1-[29-[[2-(acetylamino)-2-deoxy-beta-D-galactopyra nosyl]oxy]-14,14-bis[[3-[[3-[[5-[[2-(acetylamino)-2-deoxy-b eta-D-galactopyranosyl]oxy]-1-oxopentyl]amino]propyl]amino] -3-oxopropoxy]methyl]-1,12,19,25-tetraoxo-16-oxa-13,20,24-t riazanonacos-1-yl]-4-hydroxy-2-pyrrolidinyl)methyl ester
ccatcagcagtgattgaagta

SEQ ID NO: 295 - RNA, 21 nt, synthetic construct
  source 1..21: mol_type = other RNA
  modified_base 1: mod_base = OTHER; note = 2'-O-methyladenosine-3'-phosphorothioate
  modified_base 2: mod_base = OTHER; note = 2'-O-methyluridine-3'-phosphorothioate
  modified_base 3: mod_base = OTHER; note = 2'-O-methylcytidine-3'-phosphate
  modified_base 4: mod_base = OTHER; note = 2'-O-methyladenosine-3'-phosphate
  modified_base 5: mod_base = OTHER; note = 2'-O-methylguanosine-3'-phosphate
  modified_base 6: mod_base = OTHER; note = 2'-O-hexadecyl-cytidine-3'-phosphate
  modified_base 7: mod_base = OTHER; note = 2'-O-methyladenosine-3'-phosphate
  modified_base 8: mod_base = OTHER; note = 2'-O-methylguanosine-3'-phosphate
  modified_base 9: mod_base = OTHER; note = 2'-deoxy-2'-fluorouridine-3'-phosphate
  modified_base 10: mod_base = OTHER; note = 2'-deoxy-2'-fluoroguanosine-3'-phosphate
  modified_base 11: mod_base = OTHER; note = 2'-deoxy-2'-fluoroadenosine-3'-phosphate
  modified_base 12: mod_base = OTHER; note = 2'-O-methyluridine-3'-phosphate
  modified_base 13: mod_base = OTHER; note = 2'-O-methyluridine-3'-phosphate
  modified_base 14: mod_base = OTHER; note = 2'-O-methylguanosine-3'-phosphate
  modified_base 15: mod_base = OTHER; note = 2'-O-methyladenosine-3'-phosphate
  modified_base 16: mod_base = OTHER; note = 2'-O-methyladenosine-3'-phosphate
  modified_base 17: mod_base = OTHER; note = 2'-O-methylguanosine-3'-phosphate
  modified_base 18: mod_base = OTHER; note = 2'-O-methyluridine-3'-phosphate
  modified_base 19: mod_base = OTHER; note = 2'-O-methyladenosine-3'-phosphate
  modified_base 20: mod_base = OTHER; note = 2'-O-methyluridine-3'-phosphate
  modified_base 21: mod_base = OTHER; note = 2'-O-methyladenosine-3'-phosphate ((2S,4R)-1-[29-[[2-(acetylamino)-2-deoxy-beta-D-galactopyra nosyl]oxy]-14,14-bis[[3-[[3-[[5-[[2-(acetylamino)-2-deoxy-b eta-D-galactopyranosyl]oxy]-1-oxopentyl]amino]propyl]amino] -3-oxopropoxy]methyl]-1,12,19,25-tetraoxo-16-oxa-13,20,24-t riazanonacos-1-yl]-4-hydroxy-2-pyrrolidinyl)methyl ester
atcagcagtgattgaagtata

SEQ ID NO: 296 - RNA, 21 nt, synthetic construct
  source 1..21: mol_type = other RNA
  modified_base 1: mod_base = OTHER; note = 2'-O-methyladenosine-3'-phosphorothioate
  modified_base 2: mod_base = OTHER; note = 2'-O-methylguanosine-3'-phosphorothioate
  modified_base 3: mod_base = OTHER; note = 2'-O-methylcytidine-3'-phosphate
  modified_base 4: mod_base = OTHER; note = 2'-O-methyladenosine-3'-phosphate
  modified_base 5: mod_base = OTHER; note = 2'-O-methylguanosine-3'-phosphate
  modified_base 6: mod_base = OTHER; note = 2'-O-hexadecyl-uridine-3'-phosphate
  modified_base 7: mod_base = OTHER; note = 2'-O-methylguanosine-3'-phosphate
  modified_base 8: mod_base = OTHER; note = 2'-O-methyladenosine-3'-phosphate
  modified_base 9: mod_base = OTHER; note = 2'-deoxy-2'-fluorouridine-3'-phosphate
  modified_base 10: mod_base = OTHER; note = 2'-deoxy-2'-fluorouridine-3'-phosphate
  modified_base 11: mod_base = OTHER; note = 2'-deoxy-2'-fluoroguanosine-3'-phosphate
  modified_base 12: mod_base = OTHER; note = 2'-O-methyladenosine-3'-phosphate
  modified_base 13: mod_base = OTHER; note = 2'-O-methyladenosine-3'-phosphate
  modified_base 14: mod_base = OTHER; note = 2'-O-methylguanosine-3'-phosphate
  modified_base 15: mod_base = OTHER; note = 2'-O-methyluridine-3'-phosphate
  modified_base 16: mod_base = OTHER; note = 2'-O-methyladenosine-3'-phosphate
  modified_base 17: mod_base = OTHER; note = 2'-O-methyluridine-3'-phosphate
  modified_base 18: mod_base = OTHER; note = 2'-O-methylcytidine-3'-phosphate
  modified_base 19: mod_base = OTHER; note = 2'-O-methyluridine-3'-phosphate
  modified_base 20: mod_base = OTHER; note = 2'-O-methylguanosine-3'-phosphate
  modified_base 21: mod_base = OTHER; note = 2'-O-methyladenosine-3'-phosphate ((2S,4R)-1-[29-[[2-(acetylamino)-2-deoxy-beta-D-galactopyra nosyl]oxy]-14,14-bis[[3-[[3-[[5-[[2-(acetylamino)-2-deoxy-b eta-D-galactopyranosyl]oxy]-1-oxopentyl]amino]propyl]amino] -3-oxopropoxy]methyl]-1,12,19,25-tetraoxo-16-oxa-13,20,24-t riazanonacos-1-yl]-4-hydroxy-2-pyrrolidinyl)methyl ester
agcagtgattgaagtatctga

SEQ ID NO: 297 - RNA, 21 nt, synthetic construct
  source 1..21: mol_type = other RNA
  modified_base 1: mod_base = OTHER; note = 2'-O-methylguanosine-3'-phosphorothioate
  modified_base 2: mod_base = OTHER; note = 2'-O-methylcytidine-3'-phosphorothioate
  modified_base 3: mod_base = OTHER; note = 2'-O-methyladenosine-3'-phosphate
  modified_base 4: mod_base = OTHER; note = 2'-O-methylguanosine-3'-phosphate
  modified_base 5: mod_base = OTHER; note = 2'-O-methyluridine-3'-phosphate
  modified_base 6: mod_base = OTHER; note = 2'-O-hexadecyl-guanosine-3'-phosphate
  modified_base 7: mod_base = OTHER; note = 2'-O-methyladenosine-3'-phosphate
  modified_base 8: mod_base = OTHER; note = 2'-O-methyluridine-3'-phosphate
  modified_base 9: mod_base = OTHER; note = 2'-deoxy-2'-fluorouridine-3'-phosphate
  modified_base 10: mod_base = OTHER; note = 2'-deoxy-2'-fluoroguanosine-3'-phosphate
  modified_base 11: mod_base = OTHER; note = 2'-deoxy-2'-fluoroadenosine-3'-phosphate
  modified_base 12: mod_base = OTHER; note = 2'-O-methyladenosine-3'-phosphate
  modified_base 13: mod_base = OTHER; note = 2'-O-methylguanosine-3'-phosphate
  modified_base 14: mod_base = OTHER; note = 2'-O-methyluridine-3'-phosphate
  modified_base 15: mod_base = OTHER; note = 2'-O-methyladenosine-3'-phosphate
  modified_base 16: mod_base = OTHER; note = 2'-O-methyluridine-3'-phosphate
  modified_base 17: mod_base = OTHER; note = 2'-O-methylcytidine-3'-phosphate
  modified_base 18: mod_base = OTHER; note = 2'-O-methyluridine-3'-phosphate
  modified_base 19: mod_base = OTHER; note = 2'-O-methylguanosine-3'-phosphate
  modified_base 20: mod_base = OTHER; note = 2'-O-methyluridine-3'-phosphate
  modified_base 21: mod_base = OTHER; note = 2'-O-methyladenosine-3'-phosphate ((2S,4R)-1-[29-[[2-(acetylamino)-2-deoxy-beta-D-galactopyra nosyl]oxy]-14,14-bis[[3-[[3-[[5-[[2-(acetylamino)-2-deoxy-b eta-D-galactopyranosyl]oxy]-1-oxopentyl]amino]propyl]amino] -3-oxopropoxy]methyl]-1,12,19,25-tetraoxo-16-oxa-13,20,24-t riazanonacos-1-yl]-4-hydroxy-2-pyrrolidinyl)methyl ester
gcagtgattgaagtatctgta

SEQ ID NO: 298 - RNA, 21 nt, synthetic construct
  source 1..21: mol_type = other RNA
  modified_base 1: mod_base = OTHER; note = 2'-O-methyluridine-3'-phosphorothioate
  modified_base 2: mod_base = OTHER; note = 2'-O-methyluridine-3'-phosphorothioate
  modified_base 3: mod_base = OTHER; note = 2'-O-methylcytidine-3'-phosphate
  modified_base 4: mod_base = OTHER; note = 2'-O-methyladenosine-3'-phosphate
  modified_base 5: mod_base = OTHER; note = 2'-O-methylcytidine-3'-phosphate
  modified_base 6: mod_base = OTHER; note = 2'-O-hexadecyl-uridine-3'-phosphate
  modified_base 7: mod_base = OTHER; note = 2'-O-methylguanosine-3'-phosphate
  modified_base 8: mod_base = OTHER; note = 2'-O-methyladenosine-3'-phosphate
  modified_base 9: mod_base = OTHER; note = 2'-deoxy-2'-fluoroadenosine-3'-phosphate
  modified_base 10: mod_base = OTHER; note = 2'-deoxy-2'-fluoroguanosine-3'-phosphate
  modified_base 11: mod_base = OTHER; note = 2'-deoxy-2'-fluorouridine-3'-phosphate
  modified_base 12: mod_base = OTHER; note = 2'-O-methylguanosine-3'-phosphate
  modified_base 13: mod_base = OTHER; note = 2'-O-methyladenosine-3'-phosphate
  modified_base 14: mod_base = OTHER; note = 2'-O-methyladenosine-3'-phosphate
  modified_base 15: mod_base = OTHER; note = 2'-O-methyluridine-3'-phosphate
  modified_base 16: mod_base = OTHER; note = 2'-O-methyladenosine-3'-phosphate
  modified_base 17: mod_base = OTHER; note = 2'-O-methylcytidine-3'-phosphate
  modified_base 18: mod_base = OTHER; note = 2'-O-methyladenosine-3'-phosphate
  modified_base 19: mod_base = OTHER; note = 2'-O-methyluridine-3'-phosphate
  modified_base 20: mod_base = OTHER; note = 2'-O-methylguanosine-3'-phosphate
  modified_base 21: mod_base = OTHER; note = 2'-O-methyladenosine-3'-phosphate ((2S,4R)-1-[29-[[2-(acetylamino)-2-deoxy-beta-D-galactopyra nosyl]oxy]-14,14-bis[[3-[[3-[[5-[[2-(acetylamino)-2-deoxy-b eta-D-galactopyranosyl]oxy]-1-oxopentyl]amino]propyl]amino] -3-oxopropoxy]methyl]-1,12,19,25-tetraoxo-16-oxa-13,20,24-t riazanonacos-1-yl]-4-hydroxy-2-pyrrolidinyl)methyl ester
ttcactgaagtgaatacatga

SEQ ID NO: 299 - RNA, 21 nt, synthetic construct
  source 1..21: mol_type = other RNA
  modified_base 1: mod_base = OTHER; note = 2'-O-methyluridine-3'-phosphorothioate
  modified_base 2: mod_base = OTHER; note = 2'-O-methyladenosine-3'-phosphorothioate
  modified_base 3: mod_base = OTHER; note = 2'-O-methyladenosine-3'-phosphate
  modified_base 4: mod_base = OTHER; note = 2'-O-methylguanosine-3'-phosphate
  modified_base 5: mod_base = OTHER; note = 2'-O-methyluridine-3'-phosphate
  modified_base 6: mod_base = OTHER; note = 2'-O-hexadecyl-guanosine-3'-phosphate
  modified_base 7: mod_base = OTHER; note = 2'-O-methyladenosine-3'-phosphate
  modified_base 8: mod_base = OTHER; note = 2'-O-methylcytidine-3'-phosphate
  modified_base 9: mod_base = OTHER; note = 2'-deoxy-2'-fluorouridine-3'-phosphate
  modified_base 10: mod_base = OTHER; note = 2'-deoxy-2'-fluoroadenosine-3'-phosphate
  modified_base 11: mod_base = OTHER; note = 2'-deoxy-2'-fluorocytidine-3'-phosphate
  modified_base 12: mod_base = OTHER; note = 2'-O-methylcytidine-3'-phosphate
  modified_base 13: mod_base = OTHER; note = 2'-O-methyladenosine-3'-phosphate
  modified_base 14: mod_base = OTHER; note = 2'-O-methylcytidine-3'-phosphate
  modified_base 15: mod_base = OTHER; note = 2'-O-methyluridine-3'-phosphate
  modified_base 16: mod_base = OTHER; note = 2'-O-methyluridine-3'-phosphate
  modified_base 17: mod_base = OTHER; note = 2'-O-methyladenosine-3'-phosphate
  modified_base 18: mod_base = OTHER; note = 2'-O-methyluridine-3'-phosphate
  modified_base 19: mod_base = OTHER; note = 2'-O-methyluridine-3'-phosphate
  modified_base 20: mod_base = OTHER; note = 2'-O-methyluridine-3'-phosphate
  modified_base 21: mod_base = OTHER; note = 2'-O-methyladenosine-3'-phosphate ((2S,4R)-1-[29-[[2-(acetylamino)-2-deoxy-beta-D-galactopyra nosyl]oxy]-14,14-bis[[3-[[3-[[5-[[2-(acetylamino)-2-deoxy-b eta-D-galactopyranosyl]oxy]-1-oxopentyl]amino]propyl]amino] -3-oxopropoxy]methyl]-1,12,19,25-tetraoxo-16-oxa-13,20,24-t riazanonacos-1-yl]-4-hydroxy-2-pyrrolidinyl)methyl ester
taagtgactaccacttattta

SEQ ID NO: 300 - RNA, 21 nt, synthetic construct
  source 1..21: mol_type = other RNA
  modified_base 1: mod_base = OTHER; note = 2'-O-methylcytidine-3'-phosphorothioate
  modified_base 2: mod_base = OTHER; note = 2'-O-methyluridine-3'-phosphorothioate
  modified_base 3: mod_base = OTHER; note = 2'-O-methyladenosine-3'-phosphate
  modified_base 4: mod_base = OTHER; note = 2'-O-methylcytidine-3'-phosphate
  modified_base 5: mod_base = OTHER; note = 2'-O-methylcytidine-3'-phosphate
  modified_base 6: mod_base = OTHER; note = 2'-O-hexadecyl-adenosine-3'-phosphate
  modified_base 7: mod_base = OTHER; note = 2'-O-methylcytidine-3'-phosphate
  modified_base 8: mod_base = OTHER; note = 2'-O-methyluridine-3'-phosphate
  modified_base 9: mod_base = OTHER; note = 2'-deoxy-2'-fluorouridine-3'-phosphate
  modified_base 10: mod_base = OTHER; note = 2'-deoxy-2'-fluoroadenosine-3'-phosphate
  modified_base 11: mod_base = OTHER; note = 2'-deoxy-2'-fluorouridine-3'-phosphate
  modified_base 12: mod_base = OTHER; note = 2'-O-methyluridine-3'-phosphate
  modified_base 13: mod_base = OTHER; note = 2'-O-methyluridine-3'-phosphate
  modified_base 14: mod_base = OTHER; note = 2'-O-methylcytidine-3'-phosphate
  modified_base 15: mod_base = OTHER; note = 2'-O-methyluridine-3'-phosphate
  modified_base 16: mod_base = OTHER; note = 2'-O-methyladenosine-3'-phosphate
  modified_base 17: mod_base = OTHER; note = 2'-O-methyladenosine-3'-phosphate
  modified_base 18: mod_base = OTHER; note = 2'-O-methyladenosine-3'-phosphate
  modified_base 19: mod_base = OTHER; note = 2'-O-methyluridine-3'-phosphate
  modified_base 20: mod_base = OTHER; note = 2'-O-methylcytidine-3'-phosphate
  modified_base 21: mod_base = OTHER; note = 2'-O-methyladenosine-3'-phosphate ((2S,4R)-1-[29-[[2-(acetylamino)-2-deoxy-beta-D-galactopyra nosyl]oxy]-14,14-bis[[3-[[3-[[5-[[2-(acetylamino)-2-deoxy-b eta-D-galactopyranosyl]oxy]-1-oxopentyl]amino]propyl]amino] -3-oxopropoxy]methyl]-1,12,19,25-tetraoxo-16-oxa-13,20,24-t riazanonacos-1-yl]-4-hydroxy-2-pyrrolidinyl)methyl ester
ctaccacttatttctaaatca

SEQ ID NO: 301 - RNA, 21 nt, synthetic construct
  source 1..21: mol_type = other RNA
  modified_base 1: mod_base = OTHER; note = 2'-O-methyluridine-3'-phosphorothioate
  modified_base 2: mod_base = OTHER; note = 2'-O-methyladenosine-3'-phosphorothioate
  modified_base 3: mod_base = OTHER; note = 2'-O-methyluridine-3'-phosphate
  modified_base 4: mod_base = OTHER; note = 2'-O-methylguanosine-3'-phosphate
  modified_base 5: mod_base = OTHER; note = 2'-O-methyluridine-3'-phosphate
  modified_base 6: mod_base = OTHER; note = 2'-O-hexadecyl-guanosine-3'-phosphate
  modified_base 7: mod_base = OTHER; note = 2'-O-methyladenosine-3'-phosphate
  modified_base 8: mod_base = OTHER; note = 2'-O-methylguanosine-3'-phosphate
  modified_base 9: mod_base = OTHER; note = 2'-deoxy-2'-fluorocytidine-3'-phosphate
  modified_base 10: mod_base = OTHER; note = 2'-deoxy-2'-fluoroadenosine-3'-phosphate
  modified_base 11: mod_base = OTHER; note = 2'-deoxy-2'-fluorouridine-3'-phosphate
  modified_base 12: mod_base = OTHER; note = 2'-O-methylguanosine-3'-phosphate
  modified_base 13: mod_base = OTHER; note = 2'-O-methyladenosine-3'-phosphate
  modified_base 14: mod_base = OTHER; note = 2'-O-methyladenosine-3'-phosphate
  modified_base 15: mod_base = OTHER; note = 2'-O-methyladenosine-3'-phosphate
  modified_base 16: mod_base = OTHER; note = 2'-O-methylcytidine-3'-phosphate
  modified_base 17: mod_base = OTHER; note = 2'-O-methyluridine-3'-phosphate
  modified_base 18: mod_base = OTHER; note = 2'-O-methyladenosine-3'-phosphate
  modified_base 19: mod_base = OTHER; note = 2'-O-methyluridine-3'-phosphate
  modified_base 20: mod_base = OTHER; note = 2'-O-methylguanosine-3'-phosphate
  modified_base 21: mod_base = OTHER; note = 2'-O-methyladenosine-3'-phosphate ((2S,4R)-1-[29-[[2-(acetylamino)-2-deoxy-beta-D-galactopyra nosyl]oxy]-14,14-bis[[3-[[3-[[5-[[2-(acetylamino)-2-deoxy-b eta-D-galactopyranosyl]oxy]-1-oxopentyl]amino]propyl]amino] -3-oxopropoxy]methyl]-1,12,19,25-tetraoxo-16-oxa-13,20,24-t riazanonacos-1-yl]-4-hydroxy-2-pyrrolidinyl)methyl ester
tatgtgagcatgaaactatga

SEQ ID NO: 302 - RNA, 21 nt, synthetic construct
  source 1..21: mol_type = other RNA
  modified_base 1: mod_base = OTHER; note = 2'-O-methyladenosine-3'-phosphorothioate
  modified_base 2: mod_base = OTHER; note = 2'-O-methyladenosine-3'-phosphorothioate
  modified_base 3: mod_base = OTHER; note = 2'-O-methylcytidine-3'-phosphate
  modified_base 4: mod_base = OTHER; note = 2'-O-methyluridine-3'-phosphate
  modified_base 5: mod_base = OTHER; note = 2'-O-methyladenosine-3'-phosphate
  modified_base 6: mod_base = OTHER; note = 2'-O-hexadecyl-uridine-3'-phosphate
  modified_base 7: mod_base = OTHER; note = 2'-O-methylguanosine-3'-phosphate
  modified_base 8: mod_base = OTHER; note = 2'-O-methylcytidine-3'-phosphate
  modified_base 9: mod_base = OTHER; note = 2'-deoxy-2'-fluoroadenosine-3'-phosphate
  modified_base 10: mod_base = OTHER; note = 2'-deoxy-2'-fluorocytidine-3'-phosphate
  modified_base 11: mod_base = OTHER; note = 2'-deoxy-2'-fluorocytidine-3'-phosphate
  modified_base 12: mod_base = OTHER; note = 2'-O-methyluridine-3'-phosphate
  modified_base 13: mod_base = OTHER; note = 2'-O-methyladenosine-3'-phosphate
  modified_base 14: mod_base = OTHER; note = 2'-O-methyluridine-3'-phosphate
  modified_base 15: mod_base = OTHER; note = 2'-O-methyladenosine-3'-phosphate
  modified_base 16: mod_base = OTHER; note = 2'-O-methyladenosine-3'-phosphate
  modified_base 17: mod_base = OTHER; note = 2'-O-methyladenosine-3'-phosphate
  modified_base 18: mod_base = OTHER; note = 2'-O-methyluridine-3'-phosphate
  modified_base 19: mod_base = OTHER; note = 2'-O-methyladenosine-3'-phosphate
  modified_base 20: mod_base = OTHER; note = 2'-O-methylcytidine-3'-phosphate
  modified_base 21: mod_base = OTHER; note = 2'-O-methyladenosine-3'-phosphate ((2S,4R)-1-[29-[[2-(acetylamino)-2-deoxy-beta-D-galactopyra nosyl]oxy]-14,14-bis[[3-[[3-[[5-[[2-(acetylamino)-2-deoxy-b eta-D-galactopyranosyl]oxy]-1-oxopentyl]amino]propyl]amino] -3-oxopropoxy]methyl]-1,12,19,25-tetraoxo-16-oxa-13,20,24-t riazanonacos-1-yl]-4-hydroxy-2-pyrrolidinyl)methyl ester
aactatgcacctataaataca

SEQ ID NO: 303 - RNA, 21 nt, synthetic construct
  source 1..21: mol_type = other RNA
  modified_base 1: mod_base = OTHER; note = 2'-O-methylguanosine-3'-phosphorothioate
  modified_base 2: mod_base = OTHER; note = 2'-O-methyluridine-3'-phosphorothioate
  modified_base 3: mod_base = OTHER; note = 2'-O-methylguanosine-3'-phosphate
  modified_base 4: mod_base = OTHER; note = 2'-O-methyluridine-3'-phosphate
  modified_base 5: mod_base = OTHER; note = 2'-O-methylguanosine-3'-phosphate
  modified_base 6: mod_base = OTHER; note = 2'-O-hexadecyl-guanosine-3'-phosphate
  modified_base 7: mod_base = OTHER; note = 2'-deoxy-2'-fluorouridine-3'-phosphate
  modified_base 8: mod_base = OTHER; note = 2'-O-methylguanosine-3'-phosphate
  modified_base 9: mod_base = OTHER; note = 2'-deoxy-2'-fluorouridine-3'-phosphate
  modified_base 10: mod_base = OTHER; note = 2'-deoxy-2'-fluoroadenosine-3'-phosphate
  modified_base 11: mod_base = OTHER; note = 2'-deoxy-2'-fluoroadenosine-3'-phosphate
  modified_base 12: mod_base = OTHER; note = 2'-O-methyladenosine-3'-phosphate
  modified_base 13: mod_base = OTHER; note = 2'-O-methylguanosine-3'-phosphate
  modified_base 14: mod_base = OTHER; note = 2'-O-methylguanosine-3'-phosphate
  modified_base 15: mod_base = OTHER; note = 2'-O-methyladenosine-3'-phosphate
  modified_base 16: mod_base = OTHER; note = 2'-O-methyladenosine-3'-phosphate
  modified_base 17: mod_base = OTHER; note = 2'-O-methyluridine-3'-phosphate
  modified_base 18: mod_base = OTHER; note = 2'-O-methyluridine-3'-phosphate
  modified_base 19: mod_base = OTHER; note = 2'-O-methylcytidine-3'-phosphate
  modified_base 20: mod_base = OTHER; note = 2'-O-methyladenosine-3'-phosphate
  modified_base 21: mod_base = OTHER; note = 2'-O-methyladenosine-3'-phosphate ((2S,4R)-1-[29-[[2-(acetylamino)-2-deoxy-beta-D-galactopyra nosyl]oxy]-14,14-bis[[3-[[3-[[5-[[2-(acetylamino)-2-deoxy-b eta-D-galactopyranosyl]oxy]-1-oxopentyl]amino]propyl]amino] -3-oxopropoxy]methyl]-1,12,19,25-tetraoxo-16-oxa-13,20,24-t riazanonacos-1-yl]-4-hydroxy-2-pyrrolidinyl)methyl ester
gtgtggtgtaaaggaattcaa

SEQ ID NO: 304 - RNA, 21 nt, synthetic construct
  source 1..21: mol_type = other RNA
  modified_base 1: mod_base = OTHER; note = 2'-O-methylcytidine-3'-phosphorothioate
  modified_base 2: mod_base = OTHER; note = 2'-O-methyluridine-3'-phosphorothioate
  modified_base 3: mod_base = OTHER; note = 2'-O-methylguanosine-3'-phosphate
  modified_base 4: mod_base = OTHER; note = 2'-O-methyluridine-3'-phosphate
  modified_base 5: mod_base = OTHER; note = 2'-O-methyladenosine-3'-phosphate
  modified_base 6: mod_base = OTHER; note = 2'-O-hexadecyl-cytidine-3'-phosphate
  modified_base 7: mod_base = OTHER; note = 2'-deoxy-2'-fluoroadenosine-3'-phosphate
  modified_base 8: mod_base = OTHER; note = 2'-O-methyladenosine-3'-phosphate
  modified_base 9: mod_base = OTHER; note = 2'-deoxy-2'-fluoroguanosine-3'-phosphate
  modified_base 10: mod_base = OTHER; note = 2'-deoxy-2'-fluorouridine-3'-phosphate
  modified_base 11: mod_base = OTHER; note = 2'-deoxy-2'-fluoroguanosine-3'-phosphate
  modified_base 12: mod_base = OTHER; note = 2'-O-methylcytidine-3'-phosphate
  modified_base 13: mod_base = OTHER; note = 2'-O-methyluridine-3'-phosphate
  modified_base 14: mod_base = OTHER; note = 2'-O-methylcytidine-3'-phosphate
  modified_base 15: mod_base = OTHER; note = 2'-O-methyladenosine-3'-phosphate
  modified_base 16: mod_base = OTHER; note = 2'-O-methylguanosine-3'-phosphate
  modified_base 17: mod_base = OTHER; note = 2'-O-methyluridine-3'-phosphate
  modified_base 18: mod_base = OTHER; note = 2'-O-methyluridine-3'-phosphate
  modified_base 19: mod_base = OTHER; note = 2'-O-methylcytidine-3'-phosphate
  modified_base 20: mod_base = OTHER; note = 2'-O-methylcytidine-3'-phosphate
  modified_base 21: mod_base = OTHER; note = 2'-O-methyladenosine-3'-phosphate ((2S,4R)-1-[29-[[2-(acetylamino)-2-deoxy-beta-D-galactopyra nosyl]oxy]-14,14-bis[[3-[[3-[[5-[[2-(acetylamino)-2-deoxy-b eta-D-galactopyranosyl]oxy]-1-oxopentyl]amino]propyl]amino] -3-oxopropoxy]methyl]-1,12,19,25-tetraoxo-16-oxa-13,20,24-t riazanonacos-1-yl]-4-hydroxy-2-pyrrolidinyl)methyl ester
ctgtacaagtgctcagttcca

SEQ ID NO: 305 - RNA, 21 nt, synthetic construct
  source 1..21: mol_type = other RNA
  modified_base 1: mod_base = OTHER; note = 2'-O-methylguanosine-3'-phosphorothioate
  modified_base 2: mod_base = OTHER; note = 2'-O-methyluridine-3'-phosphorothioate
  modified_base 3: mod_base = OTHER; note = 2'-O-methyladenosine-3'-phosphate
  modified_base 4: mod_base = OTHER; note = 2'-O-methylcytidine-3'-phosphate
  modified_base 5: mod_base = OTHER; note = 2'-O-methyladenosine-3'-phosphate
  modified_base 6: mod_base = OTHER; note = 2'-O-hexadecyl-adenosine-3'-phosphate
  modified_base 7: mod_base = OTHER; note = 2'-deoxy-2'-fluoroguanosine-3'-phosphate
  modified_base 8: mod_base = OTHER; note = 2'-O-methyluridine-3'-phosphate
  modified_base 9: mod_base = OTHER; note = 2'-deoxy-2'-fluoroguanosine-3'-phosphate
  modified_base 10: mod_base = OTHER; note = 2'-deoxy-2'-fluorocytidine-3'-phosphate
  modified_base 11: mod_base = OTHER; note = 2'-deoxy-2'-fluorouridine-3'-phosphate
  modified_base 12: mod_base = OTHER; note = 2'-O-methylcytidine-3'-phosphate
  modified_base 13: mod_base = OTHER; note = 2'-O-methyladenosine-3'-phosphate
  modified_base 14: mod_base = OTHER; note = 2'-O-methylguanosine-3'-phosphate
  modified_base 15: mod_base = OTHER; note = 2'-O-methyluridine-3'-phosphate
  modified_base 16: mod_base = OTHER; note = 2'-O-methyluridine-3'-phosphate
  modified_base 17: mod_base = OTHER; note = 2'-O-methylcytidine-3'-phosphate
  modified_base 18: mod_base = OTHER; note = 2'-O-methylcytidine-3'-phosphate
  modified_base 19: mod_base = OTHER; note = 2'-O-methyladenosine-3'-phosphate
  modified_base 20: mod_base = OTHER; note = 2'-O-methyladenosine-3'-phosphate
  modified_base 21: mod_base = OTHER; note = 2'-O-methyladenosine-3'-phosphate ((2S,4R)-1-[29-[[2-(acetylamino)-2-deoxy-beta-D-galactopyra nosyl]oxy]-14,14-bis[[3-[[3-[[5-[[2-(acetylamino)-2-deoxy-b eta-D-galactopyranosyl]oxy]-1-oxopentyl]amino]propyl]amino] -3-oxopropoxy]methyl]-1,12,19,25-tetraoxo-16-oxa-13,20,24-t riazanonacos-1-yl]-4-hydroxy-2-pyrrolidinyl)methyl ester
gtacaagtgctcagttccaaa

SEQ ID NO: 306 - RNA, 21 nt, synthetic construct
  source 1..21: mol_type = other RNA
  modified_base 1: mod_base = OTHER; note = 2'-O-methyluridine-3'-phosphorothioate
  modified_base 2: mod_base = OTHER; note = 2'-O-methyluridine-3'-phosphorothioate
  modified_base 3: mod_base = OTHER; note = 2'-O-methylcytidine-3'-phosphate
  modified_base 4: mod_base = OTHER; note = 2'-O-methylcytidine-3'-phosphate
  modified_base 5: mod_base = OTHER; note = 2'-O-methyladenosine-3'-phosphate
  modified_base 6: mod_base = OTHER; note = 2'-O-hexadecyl-uridine-3'-phosphate
  modified_base 7: mod_base = OTHER; note = 2'-deoxy-2'-fluorocytidine-3'-phosphate
  modified_base 8: mod_base = OTHER; note = 2'-O-methyladenosine-3'-phosphate
  modified_base 9: mod_base = OTHER; note = 2'-deoxy-2'-fluoroguanosine-3'-phosphate
  modified_base 10: mod_base = OTHER; note = 2'-deoxy-2'-fluorocytidine-3'-phosphate
  modified_base 11: mod_base = OTHER; note = 2'-deoxy-2'-fluoroadenosine-3'-phosphate
  modified_base 12: mod_base = OTHER; note = 2'-O-methylguanosine-3'-phosphate
  modified_base 13: mod_base = OTHER; note = 2'-O-methyluridine-3'-phosphate
  modified_base 14: mod_base = OTHER; note = 2'-O-methylguanosine-3'-phosphate
  modified_base 15: mod_base = OTHER; note = 2'-O-methyladenosine-3'-phosphate
  modified_base 16: mod_base = OTHER; note = 2'-O-methyluridine-3'-phosphate
  modified_base 17: mod_base = OTHER; note = 2'-O-methyluridine-3'-phosphate
  modified_base 18: mod_base = OTHER; note = 2'-O-methylguanosine-3'-phosphate
  modified_base 19: mod_base = OTHER; note = 2'-O-methyladenosine-3'-phosphate
  modified_base 20: mod_base = OTHER; note = 2'-O-methyladenosine-3'-phosphate
  modified_base 21: mod_base = OTHER; note = 2'-O-methyladenosine-3'-phosphate ((2S,4R)-1-[29-[[2-(acetylamino)-2-deoxy-beta-D-galactopyra nosyl]oxy]-14,14-bis[[3-[[3-[[5-[[2-(acetylamino)-2-deoxy-b eta-D-galactopyranosyl]oxy]-1-oxopentyl]amino]propyl]amino] -3-oxopropoxy]methyl]-1,12,19,25-tetraoxo-16-oxa-13,20,24-t riazanonacos-1-yl]-4-hydroxy-2-pyrrolidinyl)methyl ester
ttccatcagcagtgattgaaa

SEQ ID NO: 307 - RNA, 21 nt, synthetic construct
  source 1..21: mol_type = other RNA
  modified_base 1: mod_base = OTHER; note = 2'-O-methylcytidine-3'-phosphorothioate
  modified_base 2: mod_base = OTHER; note = 2'-O-methylcytidine-3'-phosphorothioate
  modified_base 3: mod_base = OTHER; note = 2'-O-methyladenosine-3'-phosphate
  modified_base 4: mod_base = OTHER; note = 2'-O-methyluridine-3'-phosphate
  modified_base 5: mod_base = OTHER; note = 2'-O-methylcytidine-3'-phosphate
  modified_base 6: mod_base = OTHER; note = 2'-O-hexadecyl-adenosine-3'-phosphate
  modified_base 7: mod_base = OTHER; note = 2'-deoxy-2'-fluoroguanosine-3'-phosphate
  modified_base 8: mod_base = OTHER; note = 2'-O-methylcytidine-3'-phosphate
  modified_base 9: mod_base = OTHER; note = 2'-deoxy-2'-fluoroadenosine-3'-phosphate
  modified_base 10: mod_base = OTHER; note = 2'-deoxy-2'-fluoroguanosine-3'-phosphate
  modified_base 11: mod_base = OTHER; note = 2'-deoxy-2'-fluorouridine-3'-phosphate
  modified_base 12: mod_base = OTHER; note = 2'-O-methylguanosine-3'-phosphate
  modified_base 13: mod_base = OTHER; note = 2'-O-methyladenosine-3'-phosphate
  modified_base 14: mod_base = OTHER; note = 2'-O-methyluridine-3'-phosphate
  modified_base 15: mod_base = OTHER; note = 2'-O-methyluridine-3'-phosphate
  modified_base 16: mod_base = OTHER; note = 2'-O-methylguanosine-3'-phosphate
  modified_base 17: mod_base = OTHER; note = 2'-O-methyladenosine-3'-phosphate
  modified_base 18: mod_base = OTHER; note = 2'-O-methyladenosine-3'-phosphate
  modified_base 19: mod_base = OTHER; note = 2'-O-methylguanosine-3'-phosphate
  modified_base 20: mod_base = OTHER; note = 2'-O-methyluridine-3'-phosphate
  modified_base 21: mod_base = OTHER; note = 2'-O-methyladenosine-3'-phosphate ((2S,4R)-1-[29-[[2-(acetylamino)-2-deoxy-beta-D-galactopyra nosyl]oxy]-14,14-bis[[3-[[3-[[5-[[2-(acetylamino)-2-deoxy-b eta-D-galactopyranosyl]oxy]-1-oxopentyl]amino]propyl]amino] -3-oxopropoxy]methyl]-1,12,19,25-tetraoxo-16-oxa-13,20,24-t riazanonacos-1-yl]-4-hydroxy-2-pyrrolidinyl)methyl ester
ccatcagcagtgattgaagta

SEQ ID NO: 308 - RNA, 21 nt, synthetic construct
  source 1..21: mol_type = other RNA
  modified_base 1: mod_base = OTHER; note = 2'-O-methyladenosine-3'-phosphorothioate
  modified_base 2: mod_base = OTHER; note = 2'-O-methyluridine-3'-phosphorothioate
  modified_base 3: mod_base = OTHER; note = 2'-O-methylcytidine-3'-phosphate
  modified_base 4: mod_base = OTHER; note = 2'-O-methyladenosine-3'-phosphate
  modified_base 5: mod_base = OTHER; note = 2'-O-methylguanosine-3'-phosphate
  modified_base 6: mod_base = OTHER; note = 2'-O-hexadecyl-cytidine-3'-phosphate
  modified_base 7: mod_base = OTHER; note = 2'-deoxy-2'-fluoroadenosine-3'-phosphate
  modified_base 8: mod_base = OTHER; note = 2'-O-methylguanosine-3'-phosphate
  modified_base 9: mod_base = OTHER; note = 2'-deoxy-2'-fluorouridine-3'-phosphate
  modified_base 10: mod_base = OTHER; note = 2'-deoxy-2'-fluoroguanosine-3'-phosphate
  modified_base 11: mod_base = OTHER; note = 2'-deoxy-2'-fluoroadenosine-3'-phosphate
  modified_base 12: mod_base = OTHER; note = 2'-O-methyluridine-3'-phosphate
  modified_base 13: mod_base = OTHER; note = 2'-O-methyluridine-3'-phosphate
  modified_base 14: mod_base = OTHER; note = 2'-O-methylguanosine-3'-phosphate
  modified_base 15: mod_base = OTHER; note = 2'-O-methyladenosine-3'-phosphate
  modified_base 16: mod_base = OTHER; note = 2'-O-methyladenosine-3'-phosphate
  modified_base 17: mod_base = OTHER; note = 2'-O-methylguanosine-3'-phosphate
  modified_base 18: mod_base = OTHER; note = 2'-O-methyluridine-3'-phosphate
  modified_base 19: mod_base = OTHER; note = 2'-O-methyladenosine-3'-phosphate
  modified_base 20: mod_base = OTHER; note = 2'-O-methyluridine-3'-phosphate
  modified_base 21: mod_base = OTHER; note = 2'-O-methyladenosine-3'-phosphate ((2S,4R)-1-[29-[[2-(acetylamino)-2-deoxy-beta-D-galactopyra nosyl]oxy]-14,14-bis[[3-[[3-[[5-[[2-(acetylamino)-2-deoxy-b eta-D-galactopyranosyl]oxy]-1-oxopentyl]amino]propyl]amino] -3-oxopropoxy]methyl]-1,12,19,25-tetraoxo-16-oxa-13,20,24-t riazanonacos-1-yl]-4-hydroxy-2-pyrrolidinyl)methyl ester
atcagcagtgattgaagtata

SEQ ID NO: 309 - RNA, 21 nt, synthetic construct
  source 1..21: mol_type = other RNA
  modified_base 1: mod_base = OTHER; note = 2'-O-methylguanosine-3'-phosphorothioate
  modified_base 2: mod_base = OTHER; note = 2'-O-methylcytidine-3'-phosphorothioate
  modified_base 3: mod_base = OTHER; note = 2'-O-methyladenosine-3'-phosphate
  modified_base 4: mod_base = OTHER; note = 2'-O-methylguanosine-3'-phosphate
  modified_base 5: mod_base = OTHER; note = 2'-O-methyluridine-3'-phosphate
  modified_base 6: mod_base = OTHER; note = 2'-O-hexadecyl-guanosine-3'-phosphate
  modified_base 7: mod_base = OTHER; note = 2'-deoxy-2'-fluoroadenosine-3'-phosphate
  modified_base 8: mod_base = OTHER; note = 2'-O-methyluridine-3'-phosphate
  modified_base 9: mod_base = OTHER; note = 2'-deoxy-2'-fluorouridine-3'-phosphate
  modified_base 10: mod_base = OTHER; note = 2'-deoxy-2'-fluoroguanosine-3'-phosphate
  modified_base 11: mod_base = OTHER; note = 2'-deoxy-2'-fluoroadenosine-3'-phosphate
  modified_base 12: mod_base = OTHER; note = 2'-O-methyladenosine-3'-phosphate
  modified_base 13: mod_base = OTHER; note = 2'-O-methylguanosine-3'-phosphate
  modified_base 14: mod_base = OTHER; note = 2'-O-methyluridine-3'-phosphate
  modified_base 15: mod_base = OTHER; note = 2'-O-methyladenosine-3'-phosphate
  modified_base 16: mod_base = OTHER; note = 2'-O-methyluridine-3'-phosphate
  modified_base 17: mod_base = OTHER; note = 2'-O-methylcytidine-3'-phosphate
  modified_base 18: mod_base = OTHER; note = 2'-O-methyluridine-3'-phosphate
  modified_base 19: mod_base = OTHER; note = 2'-O-methylguanosine-3'-phosphate
  modified_base 20: mod_base = OTHER; note = 2'-O-methyluridine-3'-phosphate
  modified_base 21: mod_base = OTHER; note = 2'-O-methyladenosine-3'-phosphate ((2S,4R)-1-[29-[[2-(acetylamino)-2-deoxy-beta-D-galactopyra nosyl]oxy]-14,14-bis[[3-[[3-[[5-[[2-(acetylamino)-2-deoxy-b eta-D-galactopyranosyl]oxy]-1-oxopentyl]amino]propyl]amino] -3-oxopropoxy]methyl]-1,12,19,25-tetraoxo-16-oxa-13,20,24-t riazanonacos-1-yl]-4-hydroxy-2-pyrrolidinyl)methyl ester
gcagtgattgaagtatctgta

SEQ ID NO: 310 - RNA, 21 nt, synthetic construct
  source 1..21: mol_type = other RNA
  modified_base 1: mod_base = OTHER; note = 2'-O-methylcytidine-3'-phosphorothioate
  modified_base 2: mod_base = OTHER; note = 2'-O-methyluridine-3'-phosphorothioate
  modified_base 3: mod_base = OTHER; note = 2'-O-methyladenosine-3'-phosphate
  modified_base 4: mod_base = OTHER; note = 2'-O-methylcytidine-3'-phosphate
  modified_base 5: mod_base = OTHER; note = 2'-O-methylcytidine-3'-phosphate
  modified_base 6: mod_base = OTHER; note = 2'-O-hexadecyl-adenosine-3'-phosphate
  modified_base 7: mod_base = OTHER; note = 2'-deoxy-2'-fluorocytidine-3'-phosphate
  modified_base 8: mod_base = OTHER; note = 2'-O-methyluridine-3'-phosphate
  modified_base 9: mod_base = OTHER; note = 2'-deoxy-2'-fluorouridine-3'-phosphate
  modified_base 10: mod_base = OTHER; note = 2'-deoxy-2'-fluoroadenosine-3'-phosphate
  modified_base 11: mod_base = OTHER; note = 2'-deoxy-2'-fluorouridine-3'-phosphate
  modified_base 12: mod_base = OTHER; note = 2'-O-methyluridine-3'-phosphate
  modified_base 13: mod_base = OTHER; note = 2'-O-methyluridine-3'-phosphate
  modified_base 14: mod_base = OTHER; note = 2'-O-methylcytidine-3'-phosphate
  modified_base 15: mod_base = OTHER; note = 2'-O-methyluridine-3'-phosphate
  modified_base 16: mod_base = OTHER; note = 2'-O-methyladenosine-3'-phosphate
  modified_base 17: mod_base = OTHER; note = 2'-O-methyladenosine-3'-phosphate
  modified_base 18: mod_base = OTHER; note = 2'-O-methyladenosine-3'-phosphate
  modified_base 19: mod_base = OTHER; note = 2'-O-methyluridine-3'-phosphate
  modified_base 20: mod_base = OTHER; note = 2'-O-methylcytidine-3'-phosphate
  modified_base 21: mod_base = OTHER; note = 2'-O-methyladenosine-3'-phosphate ((2S,4R)-1-[29-[[2-(acetylamino)-2-deoxy-beta-D-galactopyra nosyl]oxy]-14,14-bis[[3-[[3-[[5-[[2-(acetylamino)-2-deoxy-b eta-D-galactopyranosyl]oxy]-1-oxopentyl]amino]propyl]amino] -3-oxopropoxy]methyl]-1,12,19,25-tetraoxo-16-oxa-13,20,24-t riazanonacos-1-yl]-4-hydroxy-2-pyrrolidinyl)methyl ester
ctaccacttatttctaaatca

SEQ ID NO: 311 - RNA, 21 nt, synthetic construct
  source 1..21: mol_type = other RNA
  modified_base 1: mod_base = OTHER; note = 2'-O-methyluridine-3'-phosphorothioate
  modified_base 2: mod_base = OTHER; note = 2'-O-methylguanosine-3'-phosphorothioate
  modified_base 3: mod_base = OTHER; note = 2'-O-methyluridine-3'-phosphate
  modified_base 4: mod_base = OTHER; note = 2'-O-methyladenosine-3'-phosphate
  modified_base 5: mod_base = OTHER; note = 2'-O-methylcytidine-3'-phosphate
  modified_base 6: mod_base = OTHER; note = 2'-O-hexadecyl-adenosine-3'-phosphate
  modified_base 7: mod_base = OTHER; note = 2'-deoxy-2'-fluoroadenosine-3'-phosphate
  modified_base 8: mod_base = OTHER; note = 2'-O-methylguanosine-3'-phosphate
  modified_base 9: mod_base = OTHER; note = 2'-deoxy-2'-fluorouridine-3'-phosphate
  modified_base 10: mod_base = OTHER; note = 2'-deoxy-2'-fluoroguanosine-3'-phosphate
  modified_base 11: mod_base = OTHER; note = 2'-deoxy-2'-fluorocytidine-3'-phosphate
  modified_base 12: mod_base = OTHER; note = 2'-O-methyluridine-3'-phosphate
  modified_base 13: mod_base = OTHER; note = 2'-O-methylcytidine-3'-phosphate
  modified_base 14: mod_base = OTHER; note = 2'-O-methyladenosine-3'-phosphate
  modified_base 15: mod_base = OTHER; note = 2'-O-methylguanosine-3'-phosphate
  modified_base 16: mod_base = OTHER; note = 2'-O-methyluridine-3'-phosphate
  modified_base 17: mod_base = OTHER; note = 2'-O-methyluridine-3'-phosphate
  modified_base 18: mod_base = OTHER; note = 2'-O-methylcytidine-3'-phosphate
  modified_base 19: mod_base = OTHER; note = 2'-O-methylcytidine-3'-phosphate
  modified_base 20: mod_base = OTHER; note = 2'-O-methyladenosine-3'-phosphate
  modified_base 21: mod_base = OTHER; note = 2'-O-methyladenosine-3'-phosphate ((2S,4R)-1-[29-[[2-(acetylamino)-2-deoxy-beta-D-galactopyra nosyl]oxy]-14,14-bis[[3-[[3-[[5-[[2-(acetylamino)-2-deoxy-b eta-D-galactopyranosyl]oxy]-1-oxopentyl]amino]propyl]amino] -3-oxopropoxy]methyl]-1,12,19,25-tetraoxo-16-oxa-13,20,24-t riazanonacos-1-yl]-4-hydroxy-2-pyrrolidinyl)methyl ester
tgtacaagtgctcagttccaa

SEQ ID NO: 312 - RNA, 21 nt, synthetic construct
  source 1..21: mol_type = other RNA
  modified_base 1: mod_base = OTHER; note = 2'-O-methyluridine-3'-phosphorothioate
  modified_base 2: mod_base = OTHER; note = 2'-O-methylcytidine-3'-phosphorothioate
  modified_base 3: mod_base = OTHER; note = 2'-O-methyluridine-3'-phosphate
  modified_base 4: mod_base = OTHER; note = 2'-O-methyluridine-3'-phosphate
  modified_base 5: mod_base = OTHER; note = 2'-O-methyluridine-3'-phosphate
  modified_base 6: mod_base = OTHER; note = 2'-O-methylguanosine-3'-phosphate
  modified_base 7: mod_base = OTHER; note = 2'-O-methylcytidine-3'-phosphate
  modified_base 8: mod_base = OTHER; note = 2'-O-methyluridine-3'-phosphate
  modified_base 9: mod_base = OTHER; note = 2'-deoxy-2'-fluorocytidine-3'-phosphate
  modified_base 10: mod_base = OTHER; note = 2'-deoxy-2'-fluorocytidine-3'-phosphate
  modified_base 11: mod_base = OTHER; note = 2'-deoxy-2'-fluorocytidine-3'-phosphate
  modified_base 12: mod_base = OTHER; note = 2'-O-methyladenosine-3'-phosphate
  modified_base 13: mod_base = OTHER; note = 2'-O-methylguanosine-3'-phosphate
  modified_base 14: mod_base = OTHER; note = 2'-O-methyluridine-3'-phosphate
  modified_base 15: mod_base = OTHER; note = 2'-O-methyluridine-3'-phosphate
  modified_base 16: mod_base = OTHER; note = 2'-O-hexadecyl-uridine-3'-phosphate
  modified_base 17: mod_base = OTHER; note = 2'-O-methylcytidine-3'-phosphate
  modified_base 18: mod_base = OTHER; note = 2'-O-methyluridine-3'-phosphate
  modified_base 19: mod_base = OTHER; note = 2'-O-methyluridine-3'-phosphate
  modified_base 20: mod_base = OTHER; note = 2'-O-methylguanosine-3'-phosphate
  modified_base 21: mod_base = OTHER; note = 2'-O-methyladenosine-3'-phosphate ((2S,4R)-1-[29-[[2-(acetylamino)-2-deoxy-beta-D-galactopyra nosyl]oxy]-14,14-bis[[3-[[3-[[5-[[2-(acetylamino)-2-deoxy-b eta-D-galactopyranosyl]oxy]-1-oxopentyl]amino]propyl]amino] -3-oxopropoxy]methyl]-1,12,19,25-tetraoxo-16-oxa-13,20,24-t riazanonacos-1-yl]-4-hydroxy-2-pyrrolidinyl)methyl ester
tctttgctcccagtttcttga

SEQ ID NO: 313 - RNA, 21 nt, synthetic construct
  source 1..21: mol_type = other RNA
  modified_base 1: mod_base = OTHER; note = 2'-O-methyladenosine-3'-phosphorothioate
  modified_base 2: mod_base = OTHER; note = 2'-O-methyluridine-3'-phosphorothioate
  modified_base 3: mod_base = OTHER; note = 2'-O-methylguanosine-3'-phosphate
  modified_base 4: mod_base = OTHER; note = 2'-O-methyladenosine-3'-phosphate
  modified_base 5: mod_base = OTHER; note = 2'-O-methyladenosine-3'-phosphate
  modified_base 6: mod_base = OTHER; note = 2'-O-methyladenosine-3'-phosphate
  modified_base 7: mod_base = OTHER; note = 2'-deoxy-2'-fluoroguanosine-3'-phosphate
  modified_base 8: mod_base = OTHER; note = 2'-O-methylguanosine-3'-phosphate
  modified_base 9: mod_base = OTHER; note = 2'-deoxy-2'-fluoroadenosine-3'-phosphate
  modified_base 10: mod_base = OTHER; note = 2'-deoxy-2'-fluorocytidine-3'-phosphate
  modified_base 11: mod_base = OTHER; note = 2'-deoxy-2'-fluorouridine-3'-phosphate
  modified_base 12: mod_base = OTHER; note = 2'-O-methyluridine-3'-phosphate
  modified_base 13: mod_base = OTHER; note = 2'-O-methyluridine-3'-phosphate
  modified_base 14: mod_base = OTHER; note = 2'-O-methylcytidine-3'-phosphate
  modified_base 15: mod_base = OTHER; note = 2'-O-methyladenosine-3'-phosphate
  modified_base 16: mod_base = OTHER; note = 2'-O-methyladenosine-3'-phosphate
  modified_base 17: mod_base = OTHER; note = 2'-O-methyladenosine-3'-phosphate
  modified_base 18: mod_base = OTHER; note = 2'-O-methylguanosine-3'-phosphate
  modified_base 19: mod_base = OTHER; note = 2'-O-methylguanosine-3'-phosphate
  modified_base 20: mod_base = OTHER; note = 2'-O-methylcytidine-3'-phosphate
  modified_base 21: mod_base = OTHER; note = 2'-O-methyladenosine-3'-phosphate ((2S,4R)-1-[29-[[2-(acetylamino)-2-deoxy-beta-D-galactopyra nosyl]oxy]-14,14-bis[[3-[[3-[[5-[[2-(acetylamino)-2-deoxy-b eta-D-galactopyranosyl]oxy]-1-oxopentyl]amino]propyl]amino] -3-oxopropoxy]methyl]-1,12,19,25-tetraoxo-16-oxa-13,20,24-t riazanonacos-1-yl]-4-hydroxy-2-pyrrolidinyl)methyl ester
atgaaaggactttcaaaggca

SEQ ID NO: 314 - RNA, 21 nt, synthetic construct
  source 1..21: mol_type = other RNA
  modified_base 1: mod_base = OTHER; note = 2'-O-methyladenosine-3'-phosphorothioate
  modified_base 2: mod_base = OTHER; note = 2'-O-methyladenosine-3'-phosphorothioate
  modified_base 3: mod_base = OTHER; note = 2'-O-methyladenosine-3'-phosphate
  modified_base 4: mod_base = OTHER; note = 2'-O-methylguanosine-3'-phosphate
  modified_base 5: mod_base = OTHER; note = 2'-O-methyladenosine-3'-phosphate
  modified_base 6: mod_base = OTHER; note = 2'-O-methylguanosine-3'-phosphate
  modified_base 7: mod_base = OTHER; note = 2'-deoxy-2'-fluoroguanosine-3'-phosphate
  modified_base 8: mod_base = OTHER; note = 2'-O-methylguanosine-3'-phosphate
  modified_base 9: mod_base = OTHER; note = 2'-deoxy-2'-fluorouridine-3'-phosphate
  modified_base 10: mod_base = OTHER; note = 2'-deoxy-2'-fluoroguanosine-3'-phosphate
  modified_base 11: mod_base = OTHER; note = 2'-deoxy-2'-fluorouridine-3'-phosphate
  modified_base 12: mod_base = OTHER; note = 2'-O-methyluridine-3'-phosphate
  modified_base 13: mod_base = OTHER; note = 2'-O-methylcytidine-3'-phosphate
  modified_base 14: mod_base = OTHER; note = 2'-O-methyluridine-3'-phosphate
  modified_base 15: mod_base = OTHER; note = 2'-O-methylcytidine-3'-phosphate
  modified_base 16: mod_base = OTHER; note = 2'-O-methyluridine-3'-phosphate
  modified_base 17: mod_base = OTHER; note = 2'-O-methyladenosine-3'-phosphate
  modified_base 18: mod_base = OTHER; note = 2'-O-methyluridine-3'-phosphate
  modified_base 19: mod_base = OTHER; note = 2'-O-methylguanosine-3'-phosphate
  modified_base 20: mod_base = OTHER; note = 2'-O-methyluridine-3'-phosphate
  modified_base 21: mod_base = OTHER; note = 2'-O-methyladenosine-3'-phosphate ((2S,4R)-1-[29-[[2-(acetylamino)-2-deoxy-beta-D-galactopyra nosyl]oxy]-14,14-bis[[3-[[3-[[5-[[2-(acetylamino)-2-deoxy-b eta-D-galactopyranosyl]oxy]-1-oxopentyl]amino]propyl]amino] -3-oxopropoxy]methyl]-1,12,19,25-tetraoxo-16-oxa-13,20,24-t riazanonacos-1-yl]-4-hydroxy-2-pyrrolidinyl)methyl ester
aaagagggtgttctctatgta

SEQ ID NO: 315 - RNA, 21 nt, synthetic construct
  source 1..21: mol_type = other RNA
  modified_base 1: mod_base = OTHER; note = 2'-O-methyladenosine-3'-phosphorothioate
  modified_base 2: mod_base = OTHER; note = 2'-O-methyladenosine-3'-phosphorothioate
  modified_base 3: mod_base = OTHER; note = 2'-O-methylguanosine-3'-phosphate
  modified_base 4: mod_base = OTHER; note = 2'-O-methyladenosine-3'-phosphate
  modified_base 5: mod_base = OTHER; note = 2'-O-methylguanosine-3'-phosphate
  modified_base 6: mod_base = OTHER; note = 2'-O-methylguanosine-3'-phosphate
  modified_base 7: mod_base = OTHER; note = 2'-deoxy-2'-fluoroguanosine-3'-phosphate
  modified_base 8: mod_base = OTHER; note = 2'-O-methyluridine-3'-phosphate
  modified_base 9: mod_base = OTHER; note = 2'-deoxy-2'-fluoroguanosine-3'-phosphate
  modified_base 10: mod_base = OTHER; note = 2'-deoxy-2'-fluorouridine-3'-phosphate
  modified_base 11: mod_base = OTHER; note = 2'-deoxy-2'-fluorouridine-3'-phosphate
  modified_base 12: mod_base = OTHER; note = 2'-O-methylcytidine-3'-phosphate
  modified_base 13: mod_base = OTHER; note = 2'-O-methyluridine-3'-phosphate
  modified_base 14: mod_base = OTHER; note = 2'-O-methylcytidine-3'-phosphate
  modified_base 15: mod_base = OTHER; note = 2'-O-methyluridine-3'-phosphate
  modified_base 16: mod_base = OTHER; note = 2'-O-methyladenosine-3'-phosphate
  modified_base 17: mod_base = OTHER; note = 2'-O-methyluridine-3'-phosphate
  modified_base 18: mod_base = OTHER; note = 2'-O-methylguanosine-3'-phosphate
  modified_base 19: mod_base = OTHER; note = 2'-O-methyluridine-3'-phosphate
  modified_base 20: mod_base = OTHER; note = 2'-O-methyladenosine-3'-phosphate
  modified_base 21: mod_base = OTHER; note = 2'-O-methyladenosine-3'-phosphate ((2S,4R)-1-[29-[[2-(acetylamino)-2-deoxy-beta-D-galactopyra nosyl]oxy]-14,14-bis[[3-[[3-[[5-[[2-(acetylamino)-2-deoxy-b eta-D-galactopyranosyl]oxy]-1-oxopentyl]amino]propyl]amino] -3-oxopropoxy]methyl]-1,12,19,25-tetraoxo-16-oxa-13,20,24-t riazanonacos-1-yl]-4-hydroxy-2-pyrrolidinyl)methyl ester
aagagggtgttctctatgtaa

SEQ ID NO: 316 - RNA, 21 nt, synthetic construct
  source 1..21: mol_type = other RNA
  modified_base 1: mod_base = OTHER; note = 2'-O-methyladenosine-3'-phosphorothioate
  modified_base 2: mod_base = OTHER; note = 2'-O-methyladenosine-3'-phosphorothioate
  modified_base 3: mod_base = OTHER; note = 2'-O-methylguanosine-3'-phosphate
  modified_base 4: mod_base = OTHER; note = 2'-O-methylguanosine-3'-phosphate
  modified_base 5: mod_base = OTHER; note = 2'-O-methylguanosine-3'-phosphate
  modified_base 6: mod_base = OTHER; note = 2'-O-methyluridine-3'-phosphate
  modified_base 7: mod_base = OTHER; note = 2'-deoxy-2'-fluoroadenosine-3'-phosphate
  modified_base 8: mod_base = OTHER; note = 2'-O-methyluridine-3'-phosphate
  modified_base 9: mod_base = OTHER; note = 2'-deoxy-2'-fluorocytidine-3'-phosphate
  modified_base 10: mod_base = OTHER; note = 2'-deoxy-2'-fluoroadenosine-3'-phosphate
  modified_base 11: mod_base = OTHER; note = 2'-deoxy-2'-fluoroadenosine-3'-phosphate
  modified_base 12: mod_base = OTHER; note = 2'-O-methylguanosine-3'-phosphate
  modified_base 13: mod_base = OTHER; note = 2'-O-methyladenosine-3'-phosphate
  modified_base 14: mod_base = OTHER; note = 2'-O-methylcytidine-3'-phosphate
  modified_base 15: mod_base = OTHER; note = 2'-O-methyluridine-3'-phosphate
  modified_base 16: mod_base = OTHER; note = 2'-O-methyladenosine-3'-phosphate
  modified_base 17: mod_base = OTHER; note = 2'-O-methylcytidine-3'-phosphate
  modified_base 18: mod_base = OTHER; note = 2'-O-methylguanosine-3'-phosphate
  modified_base 19: mod_base = OTHER; note = 2'-O-methyladenosine-3'-phosphate
  modified_base 20: mod_base = OTHER; note = 2'-O-methyladenosine-3'-phosphate
  modified_base 21: mod_base = OTHER; note = 2'-O-methyladenosine-3'-phosphate ((2S,4R)-1-[29-[[2-(acetylamino)-2-deoxy-beta-D-galactopyra nosyl]oxy]-14,14-bis[[3-[[3-[[5-[[2-(acetylamino)-2-deoxy-b eta-D-galactopyranosyl]oxy]-1-oxopentyl]amino]propyl]amino] -3-oxopropoxy]methyl]-1,12,19,25-tetraoxo-16-oxa-13,20,24-t riazanonacos-1-yl]-4-hydroxy-2-pyrrolidinyl)methyl ester
aagggtatcaagactacgaaa

SEQ ID NO: 317 - RNA, 21 nt, synthetic construct
  source 1..21: mol_type = other RNA
  modified_base 1: mod_base = OTHER; note = 2'-O-methyladenosine-3'-phosphorothioate
  modified_base 2: mod_base = OTHER; note = 2'-O-methylguanosine-3'-phosphorothioate
  modified_base 3: mod_base = OTHER; note = 2'-O-methylguanosine-3'-phosphate
  modified_base 4: mod_base = OTHER; note = 2'-O-methylguanosine-3'-phosphate
  modified_base 5: mod_base = OTHER; note = 2'-O-methyluridine-3'-phosphate
  modified_base 6: mod_base = OTHER; note = 2'-O-methyladenosine-3'-phosphate
  modified_base 7: mod_base = OTHER; note = 2'-deoxy-2'-fluorouridine-3'-phosphate
  modified_base 8: mod_base = OTHER; note = 2'-O-methylcytidine-3'-phosphate
  modified_base 9: mod_base = OTHER; note = 2'-deoxy-2'-fluoroadenosine-3'-phosphate
  modified_base 10: mod_base = OTHER; note = 2'-deoxy-2'-fluoroadenosine-3'-phosphate
  modified_base 11: mod_base = OTHER; note = 2'-deoxy-2'-fluoroguanosine-3'-phosphate
  modified_base 12: mod_base = OTHER; note = 2'-O-methyladenosine-3'-phosphate
  modified_base 13: mod_base = OTHER; note = 2'-O-methylcytidine-3'-phosphate
  modified_base 14: mod_base = OTHER; note = 2'-O-methyluridine-3'-phosphate
  modified_base 15: mod_base = OTHER; note = 2'-O-methyladenosine-3'-phosphate
  modified_base 16: mod_base = OTHER; note = 2'-O-methylcytidine-3'-phosphate
  modified_base 17: mod_base = OTHER; note = 2'-O-methylguanosine-3'-phosphate
  modified_base 18: mod_base = OTHER; note = 2'-O-methyladenosine-3'-phosphate
  modified_base 19: mod_base = OTHER; note = 2'-O-methyladenosine-3'-phosphate
  modified_base 20: mod_base = OTHER; note = 2'-O-methylcytidine-3'-phosphate
  modified_base 21: mod_base = OTHER; note = 2'-O-methyladenosine-3'-phosphate ((2S,4R)-1-[29-[[2-(acetylamino)-2-deoxy-beta-D-galactopyra nosyl]oxy]-14,14-bis[[3-[[3-[[5-[[2-(acetylamino)-2-deoxy-b eta-D-galactopyranosyl]oxy]-1-oxopentyl]amino]propyl]amino] -3-oxopropoxy]methyl]-1,12,19,25-tetraoxo-16-oxa-13,20,24-t riazanonacos-1-yl]-4-hydroxy-2-pyrrolidinyl)methyl ester
agggtatcaagactacgaaca

SEQ ID NO: 318 - RNA, 21 nt, synthetic construct
  source 1..21: mol_type = other RNA
  modified_base 1: mod_base = OTHER; note = 2'-O-methyluridine-3'-phosphorothioate
  modified_base 2: mod_base = OTHER; note = 2'-O-methyladenosine-3'-phosphorothioate
  modified_base 3: mod_base = OTHER; note = 2'-O-methyluridine-3'-phosphate
  modified_base 4: mod_base = OTHER; note = 2'-O-methylcytidine-3'-phosphate
  modified_base 5: mod_base = OTHER; note = 2'-O-methyladenosine-3'-phosphate
  modified_base 6: mod_base = OTHER; note = 2'-O-methyladenosine-3'-phosphate
  modified_base 7: mod_base = OTHER; note = 2'-deoxy-2'-fluoroguanosine-3'-phosphate
  modified_base 8: mod_base = OTHER; note = 2'-O-methyladenosine-3'-phosphate
  modified_base 9: mod_base = OTHER; note = 2'-deoxy-2'-fluorocytidine-3'-phosphate
  modified_base 10: mod_base = OTHER; note = 2'-deoxy-2'-fluorouridine-3'-phosphate
  modified_base 11: mod_base = OTHER; note = 2'-deoxy-2'-fluoroadenosine-3'-phosphate
  modified_base 12: mod_base = OTHER; note = 2'-O-methylcytidine-3'-phosphate
  modified_base 13: mod_base = OTHER; note = 2'-O-methylguanosine-3'-phosphate
  modified_base 14: mod_base = OTHER; note = 2'-O-methyladenosine-3'-phosphate
  modified_base 15: mod_base = OTHER; note = 2'-O-methyladenosine-3'-phosphate
  modified_base 16: mod_base = OTHER; note = 2'-O-methylcytidine-3'-phosphate
  modified_base 17: mod_base = OTHER; note = 2'-O-methylcytidine-3'-phosphate
  modified_base 18: mod_base = OTHER; note = 2'-O-methyluridine-3'-phosphate
  modified_base 19: mod_base = OTHER; note = 2'-O-methylguanosine-3'-phosphate
  modified_base 20: mod_base = OTHER; note = 2'-O-methyladenosine-3'-phosphate
  modified_base 21: mod_base = OTHER; note = 2'-O-methyladenosine-3'-phosphate ((2S,4R)-1-[29-[[2-(acetylamino)-2-deoxy-beta-D-galactopyra nosyl]oxy]-14,14-bis[[3-[[3-[[5-[[2-(acetylamino)-2-deoxy-b eta-D-galactopyranosyl]oxy]-1-oxopentyl]amino]propyl]amino] -3-oxopropoxy]methyl]-1,12,19,25-tetraoxo-16-oxa-13,20,24-t riazanonacos-1-yl]-4-hydroxy-2-pyrrolidinyl)methyl ester
tatcaagactacgaacctgaa

SEQ ID NO: 319 - RNA, 21 nt, synthetic construct
  source 1..21: mol_type = other RNA
  modified_base 1: mod_base = OTHER; note = 2'-O-methyluridine-3'-phosphorothioate
  modified_base 2: mod_base = OTHER; note = 2'-O-methylcytidine-3'-phosphorothioate
  modified_base 3: mod_base = OTHER; note = 2'-O-methyladenosine-3'-phosphate
  modified_base 4: mod_base = OTHER; note = 2'-O-methyladenosine-3'-phosphate
  modified_base 5: mod_base = OTHER; note = 2'-O-methylguanosine-3'-phosphate
  modified_base 6: mod_base = OTHER; note = 2'-O-methyladenosine-3'-phosphate
  modified_base 7: mod_base = OTHER; note = 2'-deoxy-2'-fluorocytidine-3'-phosphate
  modified_base 8: mod_base = OTHER; note = 2'-O-methyluridine-3'-phosphate
  modified_base 9: mod_base = OTHER; note = 2'-deoxy-2'-fluoroadenosine-3'-phosphate
  modified_base 10: mod_base = OTHER; note = 2'-deoxy-2'-fluorocytidine-3'-phosphate
  modified_base 11: mod_base = OTHER; note = 2'-deoxy-2'-fluoroguanosine-3'-phosphate
  modified_base 12: mod_base = OTHER; note = 2'-O-methyladenosine-3'-phosphate
  modified_base 13: mod_base = OTHER; note = 2'-O-methyladenosine-3'-phosphate
  modified_base 14: mod_base = OTHER; note = 2'-O-methylcytidine-3'-phosphate
  modified_base 15: mod_base = OTHER; note = 2'-O-methylcytidine-3'-phosphate
  modified_base 16: mod_base = OTHER; note = 2'-O-methyluridine-3'-phosphate
  modified_base 17: mod_base = OTHER; note = 2'-O-methylguanosine-3'-phosphate
  modified_base 18: mod_base = OTHER; note = 2'-O-methyladenosine-3'-phosphate
  modified_base 19: mod_base = OTHER; note = 2'-O-methyladenosine-3'-phosphate
  modified_base 20: mod_base = OTHER; note = 2'-O-methylguanosine-3'-phosphate
  modified_base 21: mod_base = OTHER; note = 2'-O-methyladenosine-3'-phosphate ((2S,4R)-1-[29-[[2-(acetylamino)-2-deoxy-beta-D-galactopyra nosyl]oxy]-14,14-bis[[3-[[3-[[5-[[2-(acetylamino)-2-deoxy-b eta-D-galactopyranosyl]oxy]-1-oxopentyl]amino]propyl]amino] -3-oxopropoxy]methyl]-1,12,19,25-tetraoxo-16-oxa-13,20,24-t riazanonacos-1-yl]-4-hydroxy-2-pyrrolidinyl)methyl ester
tcaagactacgaacctgaaga

SEQ ID NO: 320 - RNA, 21 nt, synthetic construct
  source 1..21: mol_type = other RNA
  modified_base 1: mod_base = OTHER; note = 2'-O-methyladenosine-3'-phosphorothioate
  modified_base 2: mod_base = OTHER; note = 2'-O-methylguanosine-3'-phosphorothioate
  modified_base 3: mod_base = OTHER; note = 2'-O-methyluridine-3'-phosphate
  modified_base 4: mod_base = OTHER; note = 2'-O-methyluridine-3'-phosphate
  modified_base 5: mod_base = OTHER; note = 2'-O-methyluridine-3'-phosphate
  modified_base 6: mod_base = OTHER; note = 2'-O-methylcytidine-3'-phosphate
  modified_base 7: mod_base = OTHER; note = 2'-deoxy-2'-fluorouridine-3'-phosphate
  modified_base 8: mod_base = OTHER; note = 2'-O-methyluridine-3'-phosphate
  modified_base 9: mod_base = OTHER; note = 2'-deoxy-2'-fluoroguanosine-3'-phosphate
  modified_base 10: mod_base = OTHER; note = 2'-deoxy-2'-fluoroadenosine-3'-phosphate
  modified_base 11: mod_base = OTHER; note = 2'-deoxy-2'-fluoroguanosine-3'-phosphate
  modified_base 12: mod_base = OTHER; note = 2'-O-methyladenosine-3'-phosphate
  modified_base 13: mod_base = OTHER; note = 2'-O-methyluridine-3'-phosphate
  modified_base 14: mod_base = OTHER; note = 2'-O-methylcytidine-3'-phosphate
  modified_base 15: mod_base = OTHER; note = 2'-O-methyluridine-3'-phosphate
  modified_base 16: mod_base = OTHER; note = 2'-O-methylguanosine-3'-phosphate
  modified_base 17: mod_base = OTHER; note = 2'-O-methylcytidine-3'-phosphate
  modified_base 18: mod_base = OTHER; note = 2'-O-methyluridine-3'-phosphate
  modified_base 19: mod_base = OTHER; note = 2'-O-methylguanosine-3'-phosphate
  modified_base 20: mod_base = OTHER; note = 2'-O-methyladenosine-3'-phosphate
  modified_base 21: mod_base = OTHER; note = 2'-O-methyladenosine-3'-phosphate ((2S,4R)-1-[29-[[2-(acetylamino)-2-deoxy-beta-D-galactopyra nosyl]oxy]-14,14-bis[[3-[[3-[[5-[[2-(acetylamino)-2-deoxy-b eta-D-galactopyranosyl]oxy]-1-oxopentyl]amino]propyl]amino] -3-oxopropoxy]methyl]-1,12,19,25-tetraoxo-16-oxa-13,20,24-t riazanonacos-1-yl]-4-hydroxy-2-pyrrolidinyl)methyl ester
agtttcttgagatctgctgaa

SEQ ID NO: 321 - RNA, 21 nt, synthetic construct
  source 1..21: mol_type = other RNA
  modified_base 1: mod_base = OTHER; note = 2'-O-methylcytidine-3'-phosphorothioate
  modified_base 2: mod_base = OTHER; note = 2'-O-methylcytidine-3'-phosphorothioate
  modified_base 3: mod_base = OTHER; note = 2'-O-methyladenosine-3'-phosphate
  modified_base 4: mod_base = OTHER; note = 2'-O-methylguanosine-3'-phosphate
  modified_base 5: mod_base = OTHER; note = 2'-O-methyluridine-3'-phosphate
  modified_base 6: mod_base = OTHER; note = 2'-O-methylcytidine-3'-phosphate
  modified_base 7: mod_base = OTHER; note = 2'-deoxy-2'-fluoroadenosine-3'-phosphate
  modified_base 8: mod_base = OTHER; note = 2'-O-methyluridine-3'-phosphate
  modified_base 9: mod_base = OTHER; note = 2'-deoxy-2'-fluoroguanosine-3'-phosphate
  modified_base 10: mod_base = OTHER; note = 2'-deoxy-2'-fluoroadenosine-3'-phosphate
  modified_base 11: mod_base = OTHER; note = 2'-deoxy-2'-fluorocytidine-3'-phosphate
  modified_base 12: mod_base = OTHER; note = 2'-O-methyladenosine-3'-phosphate
  modified_base 13: mod_base = OTHER; note = 2'-O-methyluridine-3'-phosphate
  modified_base 14: mod_base = OTHER; note = 2'-O-methyluridine-3'-phosphate
  modified_base 15: mod_base = OTHER; note = 2'-O-methyluridine-3'-phosphate
  modified_base 16: mod_base = OTHER; note = 2'-O-methylcytidine-3'-phosphate
  modified_base 17: mod_base = OTHER; note = 2'-O-methyluridine-3'-phosphate
  modified_base 18: mod_base = OTHER; note = 2'-O-methylcytidine-3'-phosphate
  modified_base 19: mod_base = OTHER; note = 2'-O-methyladenosine-3'-phosphate
  modified_base 20: mod_base = OTHER; note = 2'-O-methyladenosine-3'-phosphate
  modified_base 21: mod_base = OTHER; note = 2'-O-methyladenosine-3'-phosphate ((2S,4R)-1-[29-[[2-(acetylamino)-2-deoxy-beta-D-galactopyra nosyl]oxy]-14,14-bis[[3-[[3-[[5-[[2-(acetylamino)-2-deoxy-b eta-D-galactopyranosyl]oxy]-1-oxopentyl]amino]propyl]amino] -3-oxopropoxy]methyl]-1,12,19,25-tetraoxo-16-oxa-13,20,24-t riazanonacos-1-yl]-4-hydroxy-2-pyrrolidinyl)methyl ester
ccagtcatgacatttctcaaa

SEQ ID NO: 322 - RNA, 21 nt, synthetic construct
  source 1..21: mol_type = other RNA
  modified_base 1: mod_base = OTHER; note = 2'-O-methyluridine-3'-phosphorothioate
  modified_base 2: mod_base = OTHER; note = 2'-O-methyluridine-3'-phosphorothioate
  modified_base 3: mod_base = OTHER; note = 2'-O-methyluridine-3'-phosphate
  modified_base 4: mod_base = OTHER; note = 2'-O-methylcytidine-3'-phosphate
  modified_base 5: mod_base = OTHER; note = 2'-O-methyladenosine-3'-phosphate
  modified_base 6: mod_base = OTHER; note = 2'-O-methylcytidine-3'-phosphate
  modified_base 7: mod_base = OTHER; note = 2'-deoxy-2'-fluorouridine-3'-phosphate
  modified_base 8: mod_base = OTHER; note = 2'-O-methylguanosine-3'-phosphate
  modified_base 9: mod_base = OTHER; note = 2'-deoxy-2'-fluoroadenosine-3'-phosphate
  modified_base 10: mod_base = OTHER; note = 2'-deoxy-2'-fluoroadenosine-3'-phosphate
  modified_base 11: mod_base = OTHER; note = 2'-deoxy-2'-fluoroguanosine-3'-phosphate
  modified_base 12: mod_base = OTHER; note = 2'-O-methyluridine-3'-phosphate
  modified_base 13: mod_base = OTHER; note = 2'-O-methylguanosine-3'-phosphate
  modified_base 14: mod_base = OTHER; note = 2'-O-methyladenosine-3'-phosphate
  modified_base 15: mod_base = OTHER; note = 2'-O-methyladenosine-3'-phosphate
  modified_base 16: mod_base = OTHER; note = 2'-O-methyluridine-3'-phosphate
  modified_base 17: mod_base = OTHER; note = 2'-O-methyladenosine-3'-phosphate
  modified_base 18: mod_base = OTHER; note = 2'-O-methylcytidine-3'-phosphate
  modified_base 19: mod_base = OTHER; note = 2'-O-methyladenosine-3'-phosphate
  modified_base 20: mod_base = OTHER; note = 2'-O-methyluridine-3'-phosphate
  modified_base 21: mod_base = OTHER; note = 2'-O-methyladenosine-3'-phosphate ((2S,4R)-1-[29-[[2-(acetylamino)-2-deoxy-beta-D-galactopyra nosyl]oxy]-14,14-bis[[3-[[3-[[5-[[2-(acetylamino)-2-deoxy-b eta-D-galactopyranosyl]oxy]-1-oxopentyl]amino]propyl]amino] -3-oxopropoxy]methyl]-1,12,19,25-tetraoxo-16-oxa-13,20,24-t riazanonacos-1-yl]-4-hydroxy-2-pyrrolidinyl)methyl ester
tttcactgaagtgaatacata

SEQ ID NO: 323 - RNA, 21 nt, synthetic construct
  source 1..21: mol_type = other RNA
  modified_base 1: mod_base = OTHER; note = 2'-O-methyluridine-3'-phosphorothioate
  modified_base 2: mod_base = OTHER; note = 2'-O-methyluridine-3'-phosphorothioate
  modified_base 3: mod_base = OTHER; note = 2'-O-methylcytidine-3'-phosphate
  modified_base 4: mod_base = OTHER; note = 2'-O-methyladenosine-3'-phosphate
  modified_base 5: mod_base = OTHER; note = 2'-O-methylcytidine-3'-phosphate
  modified_base 6: mod_base = OTHER; note = 2'-O-methyluridine-3'-phosphate
  modified_base 7: mod_base = OTHER; note = 2'-deoxy-2'-fluoroguanosine-3'-phosphate
  modified_base 8: mod_base = OTHER; note = 2'-O-methyladenosine-3'-phosphate
  modified_base 9: mod_base = OTHER; note = 2'-deoxy-2'-fluoroadenosine-3'-phosphate
  modified_base 10: mod_base = OTHER; note = 2'-deoxy-2'-fluoroguanosine-3'-phosphate
  modified_base 11: mod_base = OTHER; note = 2'-deoxy-2'-fluorouridine-3'-phosphate
  modified_base 12: mod_base = OTHER; note = 2'-O-methylguanosine-3'-phosphate
  modified_base 13: mod_base = OTHER; note = 2'-O-methyladenosine-3'-phosphate
  modified_base 14: mod_base = OTHER; note = 2'-O-methyladenosine-3'-phosphate
  modified_base 15: mod_base = OTHER; note = 2'-O-methyluridine-3'-phosphate
  modified_base 16: mod_base = OTHER; note = 2'-O-methyladenosine-3'-phosphate
  modified_base 17: mod_base = OTHER; note = 2'-O-methylcytidine-3'-phosphate
  modified_base 18: mod_base = OTHER; note = 2'-O-methyladenosine-3'-phosphate
  modified_base 19: mod_base = OTHER; note = 2'-O-methyluridine-3'-phosphate
  modified_base 20: mod_base = OTHER; note = 2'-O-methylguanosine-3'-phosphate
  modified_base 21: mod_base = OTHER; note = 2'-O-methyladenosine-3'-phosphate ((2S,4R)-1-[29-[[2-(acetylamino)-2-deoxy-beta-D-galactopyra nosyl]oxy]-14,14-bis[[3-[[3-[[5-[[2-(acetylamino)-2-deoxy-b eta-D-galactopyranosyl]oxy]-1-oxopentyl]amino]propyl]amino] -3-oxopropoxy]methyl]-1,12,19,25-tetraoxo-16-oxa-13,20,24-t riazanonacos-1-yl]-4-hydroxy-2-pyrrolidinyl)methyl ester
ttcactgaagtgaatacatga

SEQ ID NO: 324 - RNA, 21 nt, synthetic construct
  source 1..21: mol_type = other RNA
  modified_base 1: mod_base = OTHER; note = 2'-O-methyladenosine-3'-phosphorothioate
  modified_base 2: mod_base = OTHER; note = 2'-O-methylcytidine-3'-phosphorothioate
  modified_base 3: mod_base = OTHER; note = 2'-O-methyluridine-3'-phosphate
  modified_base 4: mod_base = OTHER; note = 2'-O-methylguanosine-3'-phosphate
  modified_base 5: mod_base = OTHER; note = 2'-O-methyladenosine-3'-phosphate
  modified_base 6: mod_base = OTHER; note = 2'-O-methyladenosine-3'-phosphate
  modified_base 7: mod_base = OTHER; note = 2'-deoxy-2'-fluoroguanosine-3'-phosphate
  modified_base 8: mod_base = OTHER; note = 2'-O-methyluridine-3'-phosphate
  modified_base 9: mod_base = OTHER; note = 2'-deoxy-2'-fluoroguanosine-3'-phosphate
  modified_base 10: mod_base = OTHER; note = 2'-deoxy-2'-fluoroadenosine-3'-phosphate
  modified_base 11: mod_base = OTHER; note = 2'-deoxy-2'-fluoroadenosine-3'-phosphate
  modified_base 12: mod_base = OTHER; note = 2'-O-methyluridine-3'-phosphate
  modified_base 13: mod_base = OTHER; note = 2'-O-methyladenosine-3'-phosphate
  modified_base 14: mod_base = OTHER; note = 2'-O-methylcytidine-3'-phosphate
  modified_base 15: mod_base = OTHER; note = 2'-O-methyladenosine-3'-phosphate
  modified_base 16: mod_base = OTHER; note = 2'-O-methyluridine-3'-phosphate
  modified_base 17: mod_base = OTHER; note = 2'-O-methylguanosine-3'-phosphate
  modified_base 18: mod_base = OTHER; note = 2'-O-methylguanosine-3'-phosphate
  modified_base 19: mod_base = OTHER; note = 2'-O-methyluridine-3'-phosphate
  modified_base 20: mod_base = OTHER; note = 2'-O-methyladenosine-3'-phosphate
  modified_base 21: mod_base = OTHER; note = 2'-O-methyladenosine-3'-phosphate ((2S,4R)-1-[29-[[2-(acetylamino)-2-deoxy-beta-D-galactopyra nosyl]oxy]-14,14-bis[[3-[[3-[[5-[[2-(acetylamino)-2-deoxy-b eta-D-galactopyranosyl]oxy]-1-oxopentyl]amino]propyl]amino] -3-oxopropoxy]methyl]-1,12,19,25-tetraoxo-16-oxa-13,20,24-t riazanonacos-1-yl]-4-hydroxy-2-pyrrolidinyl)methyl ester
actgaagtgaatacatggtaa

SEQ ID NO: 325 - DNA, 23 bp, synthetic construct
  source 1..23: mol_type = other DNA
  modified_base 1: mod_base = OTHER; note = 2'-O-methyluridine-3'-phosphorothioate 5'-(E)-Vinylphosphonate
  modified_base 2: mod_base = OTHER; note = 2'-deoxyadenosine-3'-phosphorothioate
  modified_base 3: mod_base = OTHER; note = 2'-O-methyluridine-3'-phosphate
  modified_base 4: mod_base = OTHER; note = 2'-O-methylguanosine-3'-phosphate
  modified_base 6: mod_base = OTHER; note = 2'-O-methyladenosine-3'-phosphate
  modified_base 8: mod_base = OTHER; note = 2'-O-methyluridine-3'-phosphate
  modified_base 9: mod_base = OTHER; note = 2'-O-methylcytidine-3'-phosphate
  modified_base 10: mod_base = OTHER; note = 2'-O-methylcytidine-3'-phosphate
  modified_base 11: mod_base = OTHER; note = 2'-O-methyluridine-3'-phosphate
  modified_base 13: mod_base = OTHER; note = 2'-O-methyluridine-3'-phosphate
  modified_base 14: mod_base = OTHER; note = 2'-deoxy-2'-fluoroadenosine-3'-phosphate
  modified_base 15: mod_base = OTHER; note = 2'-O-methylcytidine-3'-phosphate
  modified_base 16: mod_base = OTHER; note = 2'-O-methyladenosine-3'-phosphate
  modified_base 17: mod_base = OTHER; note = 2'-O-methylcytidine-3'-phosphate
  modified_base 18: mod_base = OTHER; note = 2'-O-methylcytidine-3'-phosphate
  modified_base 19: mod_base = OTHER; note = 2'-O-methyladenosine-3'-phosphate
  modified_base 20: mod_base = OTHER; note = 2'-O-methylcytidine-3'-phosphate
  modified_base 21: mod_base = OTHER; note = 2'-O-methyladenosine-3'-phosphorothioate
  modified_base 22: mod_base = OTHER; note = 2'-O-methylcytidine-3'-phosphorothioate
  modified_base 23: mod_base = OTHER; note = 2'-O-methyluridine
  misc_feature 1: note = RNA
  misc_feature 3..4: note = RNA
  misc_feature 6: note = RNA
  misc_feature 8..11: note = RNA
  misc_feature 13..23: note = RNA
  misc_feature 2: note = DNA
  misc_feature 5: note = DNA
  misc_feature 7: note = DNA
  misc_feature 12: note = DNA
tatgaattcctttacaccacact

SEQ ID NO: 326 - DNA, 23 bp, synthetic construct
  source 1..23: mol_type = other DNA
  modified_base 1: mod_base = OTHER; note = 2'-O-methyluridine-3'-phosphorothioate 5'-(E)-Vinylphosphonate
  modified_base 2: mod_base = OTHER; note = 2'-deoxycytidine-3'-phosphorothioate
  modified_base 3: mod_base = OTHER; note = 2'-O-methyluridine-3'-phosphate
  modified_base 4: mod_base = OTHER; note = 2'-O-methyladenosine-3'-phosphate
  modified_base 6: mod_base = OTHER; note = 2'-O-methyluridine-3'-phosphate
  modified_base 8: mod_base = OTHER; note = 2'-O-methyladenosine-3'-phosphate
  modified_base 9: mod_base = OTHER; note = 2'-O-methyladenosine-3'-phosphate
  modified_base 10: mod_base = OTHER; note = 2'-O-methyluridine-3'-phosphate
  modified_base 11: mod_base = OTHER; note = 2'-O-methyluridine-3'-phosphate
  modified_base 13: mod_base = OTHER; note = 2'-O-methylcytidine-3'-phosphate
  modified_base 14: mod_base = OTHER; note = 2'-deoxy-2'-fluorouridine-3'-phosphate
  modified_base 15: mod_base = OTHER; note = 2'-O-methyluridine-3'-phosphate
  modified_base 16: mod_base = OTHER; note = 2'-O-methyluridine-3'-phosphate
  modified_base 17: mod_base = OTHER; note = 2'-O-methyladenosine-3'-phosphate
  modified_base 18: mod_base = OTHER; note = 2'-O-methylcytidine-3'-phosphate
  modified_base 19: mod_base = OTHER; note = 2'-O-methyladenosine-3'-phosphate
  modified_base 20: mod_base = OTHER; note = 2'-O-methylcytidine-3'-phosphate
  modified_base 21: mod_base = OTHER; note = 2'-O-methylcytidine-3'-phosphorothioate
  modified_base 22: mod_base = OTHER; note = 2'-O-methyladenosine-3'-phosphorothioate
  modified_base 23: mod_base = OTHER; note = 2'-O-methylcytidine
  misc_feature 1: note = RNA
  misc_feature 3..4: note = RNA
  misc_feature 6: note = RNA
  misc_feature 8..11: note = RNA
  misc_feature 13..23: note = RNA
  misc_feature 2: note = DNA
  misc_feature 5: note = DNA
  misc_feature 7: note = DNA
  misc_feature 12: note = DNA
tctaatgaattcctttacaccac

SEQ ID NO: 327 - DNA, 23 bp, synthetic construct
  source 1..23: mol_type = other DNA
  modified_base 1: mod_base = OTHER; note = 2'-O-methyluridine-3'-phosphorothioate 5'-(E)-Vinylphosphonate
  modified_base 2: mod_base = OTHER; note = 2'-deoxythymidine-3'-phosphorothioate
  modified_base 3: mod_base = OTHER; note = 2'-O-methylguanosine-3'-phosphate
  modified_base 4: mod_base = OTHER; note = 2'-O-methyladenosine-3'-phosphate
  modified_base 6: mod_base = OTHER; note = 2'-O-methyluridine-3'-phosphate
  modified_base 8: mod_base = OTHER; note = 2'-O-methylcytidine-3'-phosphate
  modified_base 9: mod_base = OTHER; note = 2'-O-methyladenosine-3'-phosphate
  modified_base 10: mod_base = OTHER; note = 2'-O-methyluridine-3'-phosphate
  modified_base 11: mod_base = OTHER; note = 2'-O-methylcytidine-3'-phosphate
  modified_base 13: mod_base = OTHER; note = 2'-O-methyladenosine-3'-phosphate
  modified_base 14: mod_base = OTHER; note = 2'-deoxy-2'-fluorouridine-3'-phosphate
  modified_base 15: mod_base = OTHER; note = 2'-O-methylguanosine-3'-phosphate
  modified_base 16: mod_base = OTHER; note = 2'-O-methylguanosine-3'-phosphate
  modified_base 17: mod_base = OTHER; note = 2'-O-methylcytidine-3'-phosphate
  modified_base 18: mod_base = OTHER; note = 2'-O-methyluridine-3'-phosphate
  modified_base 19: mod_base = OTHER; note = 2'-O-methyladenosine-3'-phosphate
  modified_base 20: mod_base = OTHER; note = 2'-O-methyladenosine-3'-phosphate
  modified_base 21: mod_base = OTHER; note = 2'-O-methyluridine-3'-phosphorothioate
  modified_base 22: mod_base = OTHER; note = 2'-O-methylguanosine-3'-phosphorothioate
  modified_base 23: mod_base = OTHER; note = 2'-O-methyladenosine
  misc_feature 1: note = RNA
  misc_feature 3..4: note = RNA
  misc_feature 6: note = RNA
  misc_feature 8..11: note = RNA
  misc_feature 13..23: note = RNA
  misc_feature 2: note = DNA
  misc_feature 5: note = DNA
  misc_feature 7: note = DNA
  misc_feature 12: note = DNA
ttgaatacatccatggctaatga

SEQ ID NO: 328 - DNA, 23 bp, synthetic construct
  source 1..23: mol_type = other DNA
  modified_base 1: mod_base = OTHER; note = 2'-O-methyluridine-3'-phosphorothioate 5'-(E)-Vinylphosphonate
  modified_base 2: mod_base = OTHER; note = 2'-deoxyadenosine-3'-phosphorothioate
  modified_base 3: mod_base = OTHER; note = 2'-O-methyluridine-3'-phosphate
  modified_base 4: mod_base = OTHER; note = 2'-O-methylguanosine-3'-phosphate
  modified_base 6: mod_base = OTHER; note = 2'-O-methyladenosine-3'-phosphate
  modified_base 8: mod_base = OTHER; note = 2'-O-methyladenosine-3'-phosphate
  modified_base 9: mod_base = OTHER; note = 2'-O-methylcytidine-3'-phosphate
  modified_base 10: mod_base = OTHER; note = 2'-O-methyladenosine-3'-phosphate
  modified_base 11: mod_base = OTHER; note = 2'-O-methyluridine-3'-phosphate
  modified_base 13: mod_base = OTHER; note = 2'-O-methylcytidine-3'-phosphate
  modified_base 14: mod_base = OTHER; note = 2'-deoxy-2'-fluoroadenosine-3'-phosphate
  modified_base 15: mod_base = OTHER; note = 2'-O-methyluridine-3'-phosphate
  modified_base 16: mod_base = OTHER; note = 2'-O-methylguanosine-3'-phosphate
  modified_base 17: mod_base = OTHER; note = 2'-O-methylguanosine-3'-phosphate
  modified_base 18: mod_base = OTHER; note = 2'-O-methylcytidine-3'-phosphate
  modified_base 19: mod_base = OTHER; note = 2'-O-methyluridine-3'-phosphate
  modified_base 20: mod_base = OTHER; note = 2'-O-methyladenosine-3'-phosphate
  modified_base 21: mod_base = OTHER; note = 2'-O-methyladenosine-3'-phosphorothioate
  modified_base 22: mod_base = OTHER; note = 2'-O-methyluridine-3'-phosphorothioate
  modified_base 23: mod_base = OTHER; note = 2'-O-methylguanosine
  misc_feature 1: note = RNA
  misc_feature 3..4: note = RNA
  misc_feature 6: note = RNA
  misc_feature 8..11: note = RNA
  misc_feature 13..23: note = RNA
  misc_feature 2: note = DNA
  misc_feature 5: note = DNA
  misc_feature 7: note = DNA
  misc_feature 12: note = DNA
tatgaatacatccatggctaatg

SEQ ID NO: 329 - DNA, 23 bp, synthetic construct
  source 1..23: mol_type = other DNA
  modified_base 1: mod_base = OTHER; note = 2'-O-methyluridine-3'-phosphorothioate 5'-(E)-Vinylphosphonate
  modified_base 2: mod_base = OTHER; note = 2'-deoxythymidine-3'-phosphorothioate
  modified_base 3: mod_base = OTHER; note = 2'-O-methyluridine-3'-phosphate
  modified_base 4: mod_base = OTHER; note = 2'-O-methylguanosine-3'-phosphate
  modified_base 6: mod_base = OTHER; note = 2'-O-methyladenosine-3'-phosphate
  modified_base 8: mod_base = OTHER; note = 2'-O-methylguanosine-3'-phosphate
  modified_base 9: mod_base = OTHER; note = 2'-O-methyluridine-3'-phosphate
  modified_base 10: mod_base = OTHER; note = 2'-O-methylcytidine-3'-phosphate
  modified_base 11: mod_base = OTHER; note = 2'-O-methylcytidine-3'-phosphate
  modified_base 13: mod_base = OTHER; note = 2'-O-methyluridine-3'-phosphate
  modified_base 14: mod_base = OTHER; note = 2'-deoxy-2'-fluorouridine-3'-phosphate
  modified_base 15: mod_base = OTHER; note = 2'-O-methylcytidine-3'-phosphate
  modified_base 16: mod_base = OTHER; note = 2'-O-methyladenosine-3'-phosphate
  modified_base 17: mod_base = OTHER; note = 2'-O-methyluridine-3'-phosphate
  modified_base 18: mod_base = OTHER; note = 2'-O-methylguanosine-3'-phosphate
  modified_base 19: mod_base = OTHER; note = 2'-O-methyladenosine-3'-phosphate
  modified_base 20: mod_base = OTHER; note = 2'-O-methyladenosine-3'-phosphate
  modified_base 21: mod_base = OTHER; note = 2'-O-methyluridine-3'-phosphorothioate
  modified_base 22: mod_base = OTHER; note = 2'-O-methyladenosine-3'-phosphorothioate
  modified_base 23: mod_base = OTHER; note = 2'-O-methylcytidine
  misc_feature 1: note = RNA
  misc_feature 3..4: note = RNA
  misc_feature 6: note = RNA
  misc_feature 8..11: note = RNA
  misc_feature 13..23: note = RNA
  misc_feature 2: note = DNA
  misc_feature 5: note = DNA
  misc_feature 7: note = DNA
  misc_feature 12: note = DNA
tttgaaagtcctttcatgaatac

SEQ ID NO: 330 - DNA, 23 bp, synthetic construct
  source 1..23: mol_type = other DNA
  modified_base 1: mod_base = OTHER; note = 2'-O-methyluridine-3'-phosphorothioate 5'-(E)-Vinylphosphonate
  modified_base 2: mod_base = OTHER; note = 2'-deoxycytidine-3'-phosphorothioate
  modified_base 3: mod_base = OTHER; note = 2'-O-methyluridine-3'-phosphate
  modified_base 4: mod_base = OTHER; note = 2'-O-methyluridine-3'-phosphate
  modified_base 6: mod_base = OTHER; note = 2'-O-methylguanosine-3'-phosphate
  modified_base 8: mod_base = OTHER; note = 2'-O-methyladenosine-3'-phosphate
  modified_base 9: mod_base = OTHER; note = 2'-O-methyladenosine-3'-phosphate
  modified_base 10: mod_base = OTHER; note = 2'-O-methylguanosine-3'-phosphate
  modified_base 11: mod_base = OTHER; note = 2'-O-methyluridine-3'-phosphate
  modified_base 13: mod_base = OTHER; note = 2'-O-methylcytidine-3'-phosphate
  modified_base 14: mod_base = OTHER; note = 2'-deoxy-2'-fluorouridine-3'-phosphate
  modified_base 15: mod_base = OTHER; note = 2'-O-methyluridine-3'-phosphate
  modified_base 16: mod_base = OTHER; note = 2'-O-methyluridine-3'-phosphate
  modified_base 17: mod_base = OTHER; note = 2'-O-methylcytidine-3'-phosphate
  modified_base 18: mod_base = OTHER; note = 2'-O-methyladenosine-3'-phosphate
  modified_base 19: mod_base = OTHER; note = 2'-O-methyluridine-3'-phosphate
  modified_base 20: mod_base = OTHER; note = 2'-O-methylguanosine-3'-phosphate
  modified_base 21: mod_base = OTHER; note = 2'-O-methyladenosine-3'-phosphorothioate
  modified_base 22: mod_base = OTHER; note = 2'-O-methyladenosine-3'-phosphorothioate
  modified_base 23: mod_base = OTHER; note = 2'-O-methyluridine
  misc_feature 1: note = RNA
  misc_feature 3..4: note = RNA
  misc_feature 6: note = RNA
  misc_feature 8..11: note = RNA
  misc_feature 13..23: note = RNA
  misc_feature 2: note = DNA
  misc_feature 5: note = DNA
  misc_feature 7: note = DNA
  misc_feature 12: note = DNA
tctttgaaagtcctttcatgaat

SEQ ID NO: 331 - DNA, 23 bp, synthetic construct
  source 1..23: mol_type = other DNA
  modified_base 1: mod_base = OTHER; note = 2'-O-methyluridine-3'-phosphorothioate 5'-(E)-Vinylphosphonate
  modified_base 2: mod_base = OTHER; note = 2'-deoxyadenosine-3'-phosphorothioate
  modified_base 3: mod_base = OTHER; note = 2'-O-methyladenosine-3'-phosphate
  modified_base 4: mod_base = OTHER; note = 2'-O-methylcytidine-3'-phosphate
  modified_base 6: mod_base = OTHER; note = 2'-O-methyluridine-3'-phosphate
  modified_base 8: mod_base = OTHER; note = 2'-O-methyluridine-3'-phosphate
  modified_base 9: mod_base = OTHER; note = 2'-O-methylguanosine-3'-phosphate
  modified_base 10: mod_base = OTHER; note = 2'-O-methyluridine-3'-phosphate
  modified_base 11: mod_base = OTHER; note = 2'-O-methylcytidine-3'-phosphate
  modified_base 13: mod_base = OTHER; note = 2'-O-methylcytidine-3'-phosphate
  modified_base 14: mod_base = OTHER; note = 2'-deoxy-2'-fluorouridine-3'-phosphate
  modified_base 15: mod_base = OTHER; note = 2'-O-methyluridine-3'-phosphate
  modified_base 16: mod_base = OTHER; note = 2'-O-methylguanosine-3'-phosphate
  modified_base 17: mod_base = OTHER; note = 2'-O-methylcytidine-3'-phosphate
  modified_base 18: mod_base = OTHER; note = 2'-O-methyluridine-3'-phosphate
  modified_base 19: mod_base = OTHER; note = 2'-O-methylcytidine-3'-phosphate
  modified_base 20: mod_base = OTHER; note = 2'-O-methyluridine-3'-phosphate
  modified_base 21: mod_base = OTHER; note = 2'-O-methyluridine-3'-phosphorothioate
  modified_base 22: mod_base = OTHER; note = 2'-O-methyluridine-3'-phosphorothioate
  modified_base 23: mod_base = OTHER; note = 2'-O-methylguanosine
  misc_feature 1: note = RNA
  misc_feature 3..4: note = RNA
  misc_feature 6: note = RNA
  misc_feature 8..11: note = RNA
  misc_feature 13..23: note = RNA
  misc_feature 2: note = DNA
  misc_feature 5: note = DNA
  misc_feature 7: note = DNA
  misc_feature 12: note = DNA
taacatttgtcacttgctctttg

SEQ ID NO: 332 - DNA, 23 bp, synthetic construct
  source 1..23: mol_type = other DNA
  modified_base 1: mod_base = OTHER; note = 2'-O-methyluridine-3'-phosphorothioate 5'-(E)-Vinylphosphonate
  modified_base 2: mod_base = OTHER; note = 2'-deoxycytidine-3'-phosphorothioate
  modified_base 3: mod_base = OTHER; note = 2'-O-methylcytidine-3'-phosphate
  modified_base 4: mod_base = OTHER; note = 2'-O-methyladenosine-3'-phosphate
  modified_base 6: mod_base = OTHER; note = 2'-O-methylcytidine-3'-phosphate
  modified_base 8: mod_base = OTHER; note = 2'-O-methyluridine-3'-phosphate
  modified_base 9: mod_base = OTHER; note = 2'-O-methyluridine-3'-phosphate
  modified_base 10: mod_base = OTHER; note = 2'-O-methyluridine-3'-phosphate
  modified_base 11: mod_base = OTHER; note = 2'-O-methylguanosine-3'-phosphate
  modified_base 13: mod_base = OTHER; note = 2'-O-methylcytidine-3'-phosphate
  modified_base 14: mod_base = OTHER; note = 2'-deoxy-2'-fluoroadenosine-3'-phosphate
  modified_base 15: mod_base = OTHER; note = 2'-O-methylcytidine-3'-phosphate
  modified_base 16: mod_base = OTHER; note = 2'-O-methyluridine-3'-phosphate
  modified_base 17: mod_base = OTHER; note = 2'-O-methyluridine-3'-phosphate
  modified_base 18: mod_base = OTHER; note = 2'-O-methylguanosine-3'-phosphate
  modified_base 19: mod_base = OTHER; note = 2'-O-methylcytidine-3'-phosphate
  modified_base 20: mod_base = OTHER; note = 2'-O-methyluridine-3'-phosphate
  modified_base 21: mod_base = OTHER; note = 2'-O-methylcytidine-3'-phosphorothioate
  modified_base 22: mod_base = OTHER; note = 2'-O-methyluridine-3'-phosphorothioate
  modified_base 23: mod_base = OTHER; note = 2'-O-methyluridine
  misc_feature 1: note = RNA
  misc_feature 3..4: note = RNA
  misc_feature 6: note = RNA
  misc_feature 8..11: note = RNA
  misc_feature 13..23: note = RNA
  misc_feature 2: note = DNA
  misc_feature 5: note = DNA
  misc_feature 7: note = DNA
  misc_feature 12: note = DNA
tccaacatttgtcacttgctctt

SEQ ID NO: 333 - DNA, 23 bp, synthetic construct
  source 1..23: mol_type = other DNA
  modified_base 1: mod_base = OTHER; note = 2'-O-methyluridine-3'-phosphorothioate 5'-(E)-Vinylphosphonate
  modified_base 2: mod_base = OTHER; note = 2'-deoxythymidine-3'-phosphorothioate
  modified_base 3: mod_base = OTHER; note = 2'-O-methyluridine-3'-phosphate
  modified_base 4: mod_base = OTHER; note = 2'-O-methylcytidine-3'-phosphate
  modified_base 6: mod_base = OTHER; note = 2'-O-methyluridine-3'-phosphate
  modified_base 8: mod_base = OTHER; note = 2'-O-methylguanosine-3'-phosphate
  modified_base 9: mod_base = OTHER; note = 2'-O-methyluridine-3'-phosphate
  modified_base 10: mod_base = OTHER; note = 2'-O-methylcytidine-3'-phosphate
  modified_base 11: mod_base = OTHER; note = 2'-O-methyluridine-3'-phosphate
  modified_base 13: mod_base = OTHER; note = 2'-O-methylguanosine-3'-phosphate
  modified_base 14: mod_base = OTHER; note = 2'-deoxy-2'-fluoroadenosine-3'-phosphate
  modified_base 15: mod_base = OTHER; note = 2'-O-methyluridine-3'-phosphate
  modified_base 16: mod_base = OTHER; note = 2'-O-methyladenosine-3'-phosphate
  modified_base 17: mod_base = OTHER; note = 2'-O-methylcytidine-3'-phosphate
  modified_base 18: mod_base = OTHER; note = 2'-O-methylcytidine-3'-phosphate
  modified_base 19: mod_base = OTHER; note = 2'-O-methylcytidine-3'-phosphate
  modified_base 20: mod_base = OTHER; note = 2'-O-methyluridine-3'-phosphate
  modified_base 21: mod_base = OTHER; note = 2'-O-methyluridine-3'-phosphorothioate
  modified_base 22: mod_base = OTHER; note = 2'-O-methylcytidine-3'-phosphorothioate
  modified_base 23: mod_base = OTHER; note = 2'-O-methylcytidine
  misc_feature 1: note = RNA
  misc_feature 3..4: note = RNA
  misc_feature 6: note = RNA
  misc_feature 8..11: note = RNA
  misc_feature 13..23: note = RNA
  misc_feature 2: note = DNA
  misc_feature 5: note = DNA
  misc_feature 7: note = DNA
  misc_feature 12: note = DNA
tttcgtagtcttgatacccttcc

SEQ ID NO: 334 - DNA, 23 bp, synthetic construct
  source 1..23: mol_type = other DNA
  modified_base 1: mod_base = OTHER; note = 2'-O-methyluridine-3'-phosphorothioate 5'-(E)-Vinylphosphonate
  modified_base 2: mod_base = OTHER; note = 2'-deoxyadenosine-3'-phosphorothioate
  modified_base 3: mod_base = OTHER; note = 2'-O-methylguanosine-3'-phosphate
  modified_base 4: mod_base = OTHER; note = 2'-O-methyladenosine-3'-phosphate
  modified_base 6: mod_base = OTHER; note = 2'-O-methyladenosine-3'-phosphate
  modified_base 8: mod_base = OTHER; note = 2'-O-methyluridine-3'-phosphate
  modified_base 9: mod_base = OTHER; note = 2'-O-methyluridine-3'-phosphate
  modified_base 10: mod_base = OTHER; note = 2'-O-methylcytidine-3'-phosphate
  modified_base 11: mod_base = OTHER; note = 2'-O-methyluridine-3'-phosphate
  modified_base 13: mod_base = OTHER; note = 2'-O-methyladenosine-3'-phosphate
  modified_base 14: mod_base = OTHER; note = 2'-deoxy-2'-fluoroguanosine-3'-phosphate
  modified_base 15: mod_base = OTHER; note = 2'-O-methylguanosine-3'-phosphate
  modified_base 16: mod_base = OTHER; note = 2'-O-methylcytidine-3'-phosphate
  modified_base 17: mod_base = OTHER; note = 2'-O-methyluridine-3'-phosphate
  modified_base 18: mod_base = OTHER; note = 2'-O-methyluridine-3'-phosphate
  modified_base 19: mod_base = OTHER; note = 2'-O-methylcytidine-3'-phosphate
  modified_base 20: mod_base = OTHER; note = 2'-O-methyladenosine-3'-phosphate
  modified_base 21: mod_base = OTHER; note = 2'-O-methylguanosine-3'-phosphorothioate
  modified_base 22: mod_base = OTHER; note = 2'-O-methylguanosine-3'-phosphorothioate
  modified_base 23: mod_base = OTHER; note = 2'-O-methyluridine
  misc_feature 1: note = RNA
  misc_feature 3..4: note = RNA
  misc_feature 6: note = RNA
  misc_feature 8..11: note = RNA
  misc_feature 13..23: note = RNA
  misc_feature 2: note = DNA
  misc_feature 5: note = DNA
  misc_feature 7: note = DNA
  misc_feature 12: note = DNA
tagatatttcttaggcttcaggt

SEQ ID NO: 335 - DNA, 23 bp, synthetic construct
  source 1..23: mol_type = other DNA
  modified_base 1: mod_base = OTHER; note = 2'-O-methyluridine-3'-phosphorothioate 5'-(E)-Vinylphosphonate
  modified_base 2: mod_base = OTHER; note = 2'-deoxyadenosine-3'-phosphorothioate
  modified_base 3: mod_base = OTHER; note = 2'-O-methyladenosine-3'-phosphate
  modified_base 4: mod_base = OTHER; note = 2'-O-methylguanosine-3'-phosphate
  modified_base 6: mod_base = OTHER; note = 2'-O-methyluridine-3'-phosphate
  modified_base 8: mod_base = OTHER; note = 2'-O-methyluridine-3'-phosphate
  modified_base 9: mod_base = OTHER; note = 2'-O-methyluridine-3'-phosphate
  modified_base 10: mod_base = OTHER; note = 2'-O-methyluridine-3'-phosphate
  modified_base 11: mod_base = OTHER; note = 2'-O-methylcytidine-3'-phosphate
  modified_base 13: mod_base = OTHER; note = 2'-O-methyluridine-3'-phosphate
  modified_base 14: mod_base = OTHER; note = 2'-deoxy-2'-fluoroadenosine-3'-phosphate
  modified_base 15: mod_base = OTHER; note = 2'-O-methylguanosine-3'-phosphate
  modified_base 16: mod_base = OTHER; note = 2'-O-methylguanosine-3'-phosphate
  modified_base 17: mod_base = OTHER; note = 2'-O-methylcytidine-3'-phosphate
  modified_base 18: mod_base = OTHER; note = 2'-O-methyluridine-3'-phosphate
  modified_base 19: mod_base = OTHER; note = 2'-O-methyluridine-3'-phosphate
  modified_base 20: mod_base = OTHER; note = 2'-O-methylcytidine-3'-phosphate
  modified_base 21: mod_base = OTHER; note = 2'-O-methyladenosine-3'-phosphorothioate
  modified_base 22: mod_base = OTHER; note = 2'-O-methylguanosine-3'-phosphorothioate
  modified_base 23: mod_base = OTHER; note = 2'-O-methylguanosine
  misc_feature 1: note = RNA
  misc_feature 3..4: note = RNA
  misc_feature 6: note = RNA
  misc_feature 8..11: note = RNA
  misc_feature 13..23: note = RNA
  misc_feature 2: note = DNA
  misc_feature 5: note = DNA
  misc_feature 7: note = DNA
  misc_feature 12: note = DNA
taagatatttcttaggcttcagg

SEQ ID NO: 336 - DNA, 23 bp, synthetic construct
  source 1..23: mol_type = other DNA
  modified_base 1: mod_base = OTHER; note = 2'-O-methyluridine-3'-phosphorothioate 5'-(E)-Vinylphosphonate
  modified_base 2: mod_base = OTHER; note = 2'-deoxycytidine-3'-phosphorothioate
  modified_base 3: mod_base = OTHER; note = 2'-O-methyladenosine-3'-phosphate
  modified_base 4: mod_base = OTHER; note = 2'-O-methyladenosine-3'-phosphate
  modified_base 6: mod_base = OTHER; note = 2'-O-methylguanosine-3'-phosphate
  modified_base 8: mod_base = OTHER; note = 2'-O-methyluridine-3'-phosphate
  modified_base 9: mod_base = OTHER; note = 2'-O-methyladenosine-3'-phosphate
  modified_base 10: mod_base = OTHER; note = 2'-O-methyluridine-3'-phosphate
  modified_base 11: mod_base = OTHER; note = 2'-O-methyluridine-3'-phosphate
  modified_base 13: mod_base = OTHER; note = 2'-O-methylcytidine-3'-phosphate
  modified_base 14: mod_base = OTHER; note = 2'-deoxy-2'-fluorouridine-3'-phosphate
  modified_base 15: mod_base = OTHER; note = 2'-O-methyluridine-3'-phosphate
  modified_base 16: mod_base = OTHER; note = 2'-O-methyladenosine-3'-phosphate
  modified_base 17: mod_base = OTHER; note = 2'-O-methylguanosine-3'-phosphate
  modified_base 18: mod_base = OTHER; note = 2'-O-methylguanosine-3'-phosphate
  modified_base 19: mod_base = OTHER; note = 2'-O-methylcytidine-3'-phosphate
  modified_base 20: mod_base = OTHER; note = 2'-O-methyluridine-3'-phosphate
  modified_base 21: mod_base = OTHER; note = 2'-O-methyluridine-3'-phosphorothioate
  modified_base 22: mod_base = OTHER; note = 2'-O-methylcytidine-3'-phosphorothioate
  modified_base 23: mod_base = OTHER; note = 2'-O-methyladenosine
  misc_feature 1: note = RNA
  misc_feature 3..4: note = RNA
  misc_feature 6: note = RNA
  misc_feature 8..11: note = RNA
  misc_feature 13..23: note = RNA
  misc_feature 2: note = DNA
  misc_feature 5: note = DNA
  misc_feature 7: note = DNA
  misc_feature 12: note = DNA
tcaaagatatttcttaggcttca

SEQ ID NO: 337 - DNA, 23 bp, synthetic construct
  source 1..23: mol_type = other DNA
  modified_base 1: mod_base = OTHER; note = 2'-O-methyluridine-3'-phosphorothioate 5'-(E)-Vinylphosphonate
  modified_base 2: mod_base = OTHER; note = 2'-deoxyguanosine-3'-phosphorothioate
  modified_base 3: mod_base = OTHER; note = 2'-O-methyladenosine-3'-phosphate
  modified_base 4: mod_base = OTHER; note = 2'-O-methylguanosine-3'-phosphate
  modified_base 6: mod_base = OTHER; note = 2'-O-methyladenosine-3'-phosphate
  modified_base 8: mod_base = OTHER; note = 2'-O-methyladenosine-3'-phosphate
  modified_base 9: mod_base = OTHER; note = 2'-O-methylguanosine-3'-phosphate
  modified_base 10: mod_base = OTHER; note = 2'-O-methyladenosine-3'-phosphate
  modified_base 11: mod_base = OTHER; note = 2'-O-methyluridine-3'-phosphate
  modified_base 13: mod_base = OTHER; note = 2'-O-methyluridine-3'-phosphate
  modified_base 14: mod_base = OTHER; note = 2'-deoxy-2'-fluorouridine-3'-phosphate
  modified_base 15: mod_base = OTHER; note = 2'-O-methyluridine-3'-phosphate
  modified_base 16: mod_base = OTHER; note = 2'-O-methylcytidine-3'-phosphate
  modified_base 17: mod_base = OTHER; note = 2'-O-methyluridine-3'-phosphate
  modified_base 18: mod_base = OTHER; note = 2'-O-methyluridine-3'-phosphate
  modified_base 19: mod_base = OTHER; note = 2'-O-methyladenosine-3'-phosphate
  modified_base 20: mod_base = OTHER; note = 2'-O-methylguanosine-3'-phosphate
  modified_base 21: mod_base = OTHER; note = 2'-O-methylguanosine-3'-phosphorothioate
  modified_base 22: mod_base = OTHER; note = 2'-O-methylcytidine-3'-phosphorothioate
  modified_base 23: mod_base = OTHER; note = 2'-O-methyluridine
  misc_feature 1: note = RNA
  misc_feature 3..4: note = RNA
  misc_feature 6: note = RNA
  misc_feature 8..11: note = RNA
  misc_feature 13..23: note = RNA
  misc_feature 2: note = DNA
  misc_feature 5: note = DNA
  misc_feature 7: note = DNA
  misc_feature 12: note = DNA
tgagcaaagatatttcttaggct

SEQ ID NO: 338 - DNA, 23 bp, synthetic construct
  source 1..23: mol_type = other DNA
  modified_base 1: mod_base = OTHER; note = 2'-O-methyluridine-3'-phosphorothioate 5'-(E)-Vinylphosphonate
  modified_base 2: mod_base = OTHER; note = 2'-deoxycytidine-3'-phosphorothioate
  modified_base 3: mod_base = OTHER; note = 2'-O-methyladenosine-3'-phosphate
  modified_base 4: mod_base = OTHER; note = 2'-O-methyladenosine-3'-phosphate
  modified_base 6: mod_base = OTHER; note = 2'-O-methyladenosine-3'-phosphate
  modified_base 8: mod_base = OTHER; note = 2'-O-methyladenosine-3'-phosphate
  modified_base 9: mod_base = OTHER; note = 2'-O-methylcytidine-3'-phosphate
  modified_base 10: mod_base = OTHER; note = 2'-O-methyluridine-3'-phosphate
  modified_base 11: mod_base = OTHER; note = 2'-O-methylguanosine-3'-phosphate
  modified_base 13: mod_base = OTHER; note = 2'-O-methylguanosine-3'-phosphate
  modified_base 14: mod_base = OTHER; note = 2'-deoxy-2'-fluoroadenosine-3'-phosphate
  modified_base 15: mod_base = OTHER; note = 2'-O-methylguanosine-3'-phosphate
  modified_base 16: mod_base = OTHER; note = 2'-O-methylcytidine-3'-phosphate
  modified_base 17: mod_base = OTHER; note = 2'-O-methyladenosine-3'-phosphate
  modified_base 18: mod_base = OTHER; note = 2'-O-methyladenosine-3'-phosphate
  modified_base 19: mod_base = OTHER; note = 2'-O-methyladenosine-3'-phosphate
  modified_base 20: mod_base = OTHER; note = 2'-O-methylguanosine-3'-phosphate
  modified_base 21: mod_base = OTHER; note = 2'-O-methyladenosine-3'-phosphorothioate
  modified_base 22: mod_base = OTHER; note = 2'-O-methyluridine-3'-phosphorothioate
  modified_base 23: mod_base = OTHER; note = 2'-O-methyladenosine
  misc_feature 1: note = RNA
  misc_feature 3..4: note = RNA
  misc_feature 6: note = RNA
  misc_feature 8..11: note = RNA
  misc_feature 13..23: note = RNA
  misc_feature 2: note = DNA
  misc_feature 5: note = DNA
  misc_feature 7: note = DNA
  misc_feature 12: note = DNA
tcaagaaactgggagcaaagata

SEQ ID NO: 339 - DNA, 23 bp, synthetic construct
  source 1..23: mol_type = other DNA
  modified_base 1: mod_base = OTHER; note = 2'-O-methyluridine-3'-phosphorothioate 5'-(E)-Vinylphosphonate
  modified_base 2: mod_base = OTHER; note = 2'-deoxythymidine-3'-phosphorothioate
  modified_base 3: mod_base = OTHER; note = 2'-O-methylcytidine-3'-phosphate
  modified_base 4: mod_base = OTHER; note = 2'-O-methyladenosine-3'-phosphate
  modified_base 6: mod_base = OTHER; note = 2'-O-methylguanosine-3'-phosphate
  modified_base 8: mod_base = OTHER; note = 2'-O-methyladenosine-3'-phosphate
  modified_base 9: mod_base = OTHER; note = 2'-O-methyladenosine-3'-phosphate
  modified_base 10: mod_base = OTHER; note = 2'-O-methylcytidine-3'-phosphate
  modified_base 11: mod_base = OTHER; note = 2'-O-methyluridine-3'-phosphate
  modified_base 13: mod_base = OTHER; note = 2'-O-methylguanosine-3'-phosphate
  modified_base 14: mod_base = OTHER; note = 2'-deoxy-2'-fluoroguanosine-3'-phosphate
  modified_base 15: mod_base = OTHER; note = 2'-O-methyladenosine-3'-phosphate
  modified_base 16: mod_base = OTHER; note = 2'-O-methylguanosine-3'-phosphate
  modified_base 17: mod_base = OTHER; note = 2'-O-methylcytidine-3'-phosphate
  modified_base 18: mod_base = OTHER; note = 2'-O-methyladenosine-3'-phosphate
  modified_base 19: mod_base = OTHER; note = 2'-O-methyladenosine-3'-phosphate
  modified_base 20: mod_base = OTHER; note = 2'-O-methyladenosine-3'-phosphate
  modified_base 21: mod_base = OTHER; note = 2'-O-methylguanosine-3'-phosphorothioate
  modified_base 22: mod_base = OTHER; note = 2'-O-methyladenosine-3'-phosphorothioate
  modified_base 23: mod_base = OTHER; note = 2'-O-methyluridine
  misc_feature 1: note = RNA
  misc_feature 3..4: note = RNA
  misc_feature 6: note = RNA
  misc_feature 8..11: note = RNA
  misc_feature 13..23: note = RNA
  misc_feature 2: note = DNA
  misc_feature 5: note = DNA
  misc_feature 7: note = DNA
  misc_feature 12: note = DNA
ttcaagaaactgggagcaaagat

SEQ ID NO: 340 - DNA, 23 bp, synthetic construct
  source 1..23: mol_type = other DNA
  modified_base 1: mod_base = OTHER; note = 2'-O-methyluridine-3'-phosphorothioate 5'-(E)-Vinylphosphonate
  modified_base 2: mod_base = OTHER; note = 2'-deoxycytidine-3'-phosphorothioate
  modified_base 3: mod_base = OTHER; note = 2'-O-methyluridine-3'-phosphate
  modified_base 4: mod_base = OTHER; note = 2'-O-methylcytidine-3'-phosphate
  modified_base 6: mod_base = OTHER; note = 2'-O-methyladenosine-3'-phosphate
  modified_base 8: mod_base = OTHER; note = 2'-O-methyladenosine-3'-phosphate
  modified_base 9: mod_base = OTHER; note = 2'-O-methyladenosine-3'-phosphate
  modified_base 10: mod_base = OTHER; note = 2'-O-methyladenosine-3'-phosphate
  modified_base 11: mod_base = OTHER; note = 2'-O-methylcytidine-3'-phosphate
  modified_base 13: mod_base = OTHER; note = 2'-O-methylguanosine-3'-phosphate
  modified_base 14: mod_base = OTHER; note = 2'-deoxy-2'-fluoroguanosine-3'-phosphate
  modified_base 15: mod_base = OTHER; note = 2'-O-methylguanosine-3'-phosphate
  modified_base 16: mod_base = OTHER; note = 2'-O-methyladenosine-3'-phosphate
  modified_base 17: mod_base = OTHER; note = 2'-O-methylguanosine-3'-phosphate
  modified_base 18: mod_base = OTHER; note = 2'-O-methylcytidine-3'-phosphate
  modified_base 19: mod_base = OTHER; note = 2'-O-methyladenosine-3'-phosphate
  modified_base 20: mod_base = OTHER; note = 2'-O-methyladenosine-3'-phosphate
  modified_base 21: mod_base = OTHER; note = 2'-O-methyladenosine-3'-phosphorothioate
  modified_base 22: mod_base = OTHER; note = 2'-O-methylguanosine-3'-phosphorothioate
  modified_base 23: mod_base = OTHER; note = 2'-O-methyladenosine
  misc_feature 1: note = RNA
  misc_feature 3..4: note = RNA
  misc_feature 6: note = RNA
  misc_feature 8..11: note = RNA
  misc_feature 13..23: note = RNA
  misc_feature 2: note = DNA
  misc_feature 5: note = DNA
  misc_feature 7: note = DNA
  misc_feature 12: note = DNA
tctcaagaaactgggagcaaaga

SEQ ID NO: 341 - DNA, 23 bp, synthetic construct
  source 1..23: mol_type = other DNA
  modified_base 1: mod_base = OTHER; note = 2'-O-methyluridine-3'-phosphorothioate 5'-(E)-Vinylphosphonate
  modified_base 2: mod_base = OTHER; note = 2'-deoxycytidine-3'-phosphorothioate
  modified_base 3: mod_base = OTHER; note = 2'-O-methyladenosine-3'-phosphate
  modified_base 4: mod_base = OTHER; note = 2'-O-methylguanosine-3'-phosphate
  modified_base 6: mod_base = OTHER; note = 2'-O-methyluridine-3'-phosphate
  modified_base 8: mod_base = OTHER; note = 2'-O-methyluridine-3'-phosphate
  modified_base 9: mod_base = OTHER; note = 2'-O-methylcytidine-3'-phosphate
  modified_base 10: mod_base = OTHER; note = 2'-O-methyladenosine-3'-phosphate
  modified_base 11: mod_base = OTHER; note = 2'-O-methyladenosine-3'-phosphate
  modified_base 13: mod_base = OTHER; note = 2'-O-methyladenosine-3'-phosphate
  modified_base 14: mod_base = OTHER; note = 2'-deoxy-2'-fluoroadenosine-3'-phosphate
  modified_base 15: mod_base = OTHER; note = 2'-O-methyladenosine-3'-phosphate
  modified_base 16: mod_base = OTHER; note = 2'-O-methylcytidine-3'-phosphate
  modified_base 17: mod_base = OTHER; note = 2'-O-methyluridine-3'-phosphate
  modified_base 18: mod_base = OTHER; note = 2'-O-methylguanosine-3'-phosphate
  modified_base 19: mod_base = OTHER; note = 2'-O-methylguanosine-3'-phosphate
  modified_base 20: mod_base = OTHER; note = 2'-O-methylguanosine-3'-phosphate
  modified_base 21: mod_base = OTHER; note = 2'-O-methyladenosine-3'-phosphorothioate
  modified_base 22: mod_base = OTHER; note = 2'-O-methylguanosine-3'-phosphorothioate
  modified_base 23: mod_base = OTHER; note = 2'-O-methylcytidine
  misc_feature 1: note = RNA
  misc_feature 3..4: note = RNA
  misc_feature 6: note = RNA
  misc_feature 8..11: note = RNA
  misc_feature 13..23: note = RNA
  misc_feature 2: note = DNA
  misc_feature 5: note = DNA
  misc_feature 7: note = DNA
  misc_feature 12: note = DNA
tcagatctcaagaaactgggagc

SEQ ID NO: 342 - DNA, 23 bp, synthetic construct
  source 1..23: mol_type = other DNA
  modified_base 1: mod_base = OTHER; note = 2'-O-methyluridine-3'-phosphorothioate 5'-(E)-Vinylphosphonate
  modified_base 2: mod_base = OTHER; note = 2'-deoxycytidine-3'-phosphorothioate
  modified_base 3: mod_base = OTHER; note = 2'-O-methyladenosine-3'-phosphate
  modified_base 4: mod_base = OTHER; note = 2'-O-methylcytidine-3'-phosphate
  modified_base 6: mod_base = OTHER; note = 2'-O-methyluridine-3'-phosphate
  modified_base 8: mod_base = OTHER; note = 2'-O-methylguanosine-3'-phosphate
  modified_base 9: mod_base = OTHER; note = 2'-O-methylguanosine-3'-phosphate
  modified_base 10: mod_base = OTHER; note = 2'-O-methyladenosine-3'-phosphate
  modified_base 11: mod_base = OTHER; note = 2'-O-methyladenosine-3'-phosphate
  modified_base 13: mod_base = OTHER; note = 2'-O-methyluridine-3'-phosphate
  modified_base 14: mod_base = OTHER; note = 2'-deoxy-2'-fluoroguanosine-3'-phosphate
  modified_base 15: mod_base = OTHER; note = 2'-O-methyladenosine-3'-phosphate
  modified_base 16: mod_base = OTHER; note = 2'-O-methylguanosine-3'-phosphate
  modified_base 17: mod_base = OTHER; note = 2'-O-methylcytidine-3'-phosphate
  modified_base 18: mod_base = OTHER; note = 2'-O-methyladenosine-3'-phosphate
  modified_base 19: mod_base = OTHER; note = 2'-O-methylcytidine-3'-phosphate
  modified_base 20: mod_base = OTHER; note = 2'-O-methyluridine-3'-phosphate
  modified_base 21: mod_base = OTHER; note = 2'-O-methyluridine-3'-phosphorothioate
  modified_base 22: mod_base = OTHER; note = 2'-O-methylguanosine-3'-phosphorothioate
  modified_base 23: mod_base = OTHER; note = 2'-O-methyluridine
  misc_feature 1: note = RNA
  misc_feature 3..4: note = RNA
  misc_feature 6: note = RNA
  misc_feature 8..11: note = RNA
  misc_feature 13..23: note = RNA
  misc_feature 2: note = DNA
  misc_feature 5: note = DNA
  misc_feature 7: note = DNA
  misc_feature 12: note = DNA
tcacattggaactgagcacttgt

SEQ ID NO: 343 - DNA, 23 bp, synthetic construct
  source 1..23: mol_type = other DNA
  modified_base 1: mod_base = OTHER; note = 2'-O-methyluridine-3'-phosphorothioate 5'-(E)-Vinylphosphonate
  modified_base 2: mod_base = OTHER; note = 2'-deoxyguanosine-3'-phosphorothioate
  modified_base 3: mod_base = OTHER; note = 2'-O-methylcytidine-3'-phosphate
  modified_base 4: mod_base = OTHER; note = 2'-O-methyladenosine-3'-phosphate
  modified_base 6: mod_base = OTHER; note = 2'-O-methyladenosine-3'-phosphate
  modified_base 8: mod_base = OTHER; note = 2'-O-methyluridine-3'-phosphate
  modified_base 9: mod_base = OTHER; note = 2'-O-methylguanosine-3'-phosphate
  modified_base 10: mod_base = OTHER; note = 2'-O-methylguanosine-3'-phosphate
  modified_base 11: mod_base = OTHER; note = 2'-O-methyladenosine-3'-phosphate
  modified_base 13: mod_base = OTHER; note = 2'-O-methylcytidine-3'-phosphate
  modified_base 14: mod_base = OTHER; note = 2'-deoxy-2'-fluorouridine-3'-phosphate
  modified_base 15: mod_base = OTHER; note = 2'-O-methylguanosine-3'-phosphate
  modified_base 16: mod_base = OTHER; note = 2'-O-methyladenosine-3'-phosphate
  modified_base 17: mod_base = OTHER; note = 2'-O-methylguanosine-3'-phosphate
  modified_base 18: mod_base = OTHER; note = 2'-O-methylcytidine-3'-phosphate
  modified_base 19: mod_base = OTHER; note = 2'-O-methyladenosine-3'-phosphate
  modified_base 20: mod_base = OTHER; note = 2'-O-methylcytidine-3'-phosphate
  modified_base 21: mod_base = OTHER; note = 2'-O-methyluridine-3'-phosphorothioate
  modified_base 22: mod_base = OTHER; note = 2'-O-methyluridine-3'-phosphorothioate
  modified_base 23: mod_base = OTHER; note = 2'-O-methylguanosine
  misc_feature 1: note = RNA
  misc_feature 3..4: note = RNA
  misc_feature 6: note = RNA
  misc_feature 8..11: note = RNA
  misc_feature 13..23: note = RNA
  misc_feature 2: note = DNA
  misc_feature 5: note = DNA
  misc_feature 7: note = DNA
  misc_feature 12: note = DNA
tgcacattggaactgagcacttg

SEQ ID NO: 344 - DNA, 23 bp, synthetic construct
  source 1..23: mol_type = other DNA
  modified_base 1: mod_base = OTHER; note = 2'-O-methyluridine-3'-phosphorothioate 5'-(E)-Vinylphosphonate
  modified_base 2: mod_base = OTHER; note = 2'-deoxyadenosine-3'-phosphorothioate
  modified_base 3: mod_base = OTHER; note = 2'-O-methylguanosine-3'-phosphate
  modified_base 4: mod_base = OTHER; note = 2'-O-methyladenosine-3'-phosphate
  modified_base 6: mod_base = OTHER; note = 2'-O-methyladenosine-3'-phosphate
  modified_base 8: mod_base = OTHER; note = 2'-O-methylguanosine-3'-phosphate
  modified_base 9: mod_base = OTHER; note = 2'-O-methyluridine-3'-phosphate
  modified_base 10: mod_base = OTHER; note = 2'-O-methylcytidine-3'-phosphate
  modified_base 11: mod_base = OTHER; note = 2'-O-methyladenosine-3'-phosphate
  modified_base 13: mod_base = OTHER; note = 2'-O-methylguanosine-3'-phosphate
  modified_base 14: mod_base = OTHER; note = 2'-deoxy-2'-fluoroadenosine-3'-phosphate
  modified_base 15: mod_base = OTHER; note = 2'-O-methylcytidine-3'-phosphate
  modified_base 16: mod_base = OTHER; note = 2'-O-methyluridine-3'-phosphate
  modified_base 17: mod_base = OTHER; note = 2'-O-methylguanosine-3'-phosphate
  modified_base 18: mod_base = OTHER; note = 2'-O-methylguanosine-3'-phosphate
  modified_base 19: mod_base = OTHER; note = 2'-O-methylguanosine-3'-phosphate
  modified_base 20: mod_base = OTHER; note = 2'-O-methylcytidine-3'-phosphate
  modified_base 21: mod_base = OTHER; note = 2'-O-methyladenosine-3'-phosphorothioate
  modified_base 22: mod_base = OTHER; note = 2'-O-methylcytidine-3'-phosphorothioate
  modified_base 23: mod_base = OTHER; note = 2'-O-methyladenosine
  misc_feature 1: note = RNA
  misc_feature 3..4: note = RNA
  misc_feature 6: note = RNA
  misc_feature 8..11: note = RNA
  misc_feature 13..23: note = RNA
  misc_feature 2: note = DNA
  misc_feature 5: note = DNA
  misc_feature 7: note = DNA
  misc_feature 12: note = DNA
tagaaatgtcatgactgggcaca

SEQ ID NO: 345 - DNA, 23 bp, synthetic construct
  source 1..23: mol_type = other DNA
  modified_base 1: mod_base = OTHER; note = 2'-O-methyluridine-3'-phosphorothioate 5'-(E)-Vinylphosphonate
  modified_base 2: mod_base = OTHER; note = 2'-deoxythymidine-3'-phosphorothioate
  modified_base 3: mod_base = OTHER; note = 2'-O-methyluridine-3'-phosphate
  modified_base 4: mod_base = OTHER; note = 2'-O-methylguanosine-3'-phosphate
  modified_base 6: mod_base = OTHER; note = 2'-O-methylguanosine-3'-phosphate
  modified_base 8: mod_base = OTHER; note = 2'-O-methyladenosine-3'-phosphate
  modified_base 9: mod_base = OTHER; note = 2'-O-methyladenosine-3'-phosphate
  modified_base 10: mod_base = OTHER; note = 2'-O-methyluridine-3'-phosphate
  modified_base 11: mod_base = OTHER; note = 2'-O-methylguanosine-3'-phosphate
  modified_base 13: mod_base = OTHER; note = 2'-O-methylcytidine-3'-phosphate
  modified_base 14: mod_base = OTHER; note = 2'-deoxy-2'-fluoroadenosine-3'-phosphate
  modified_base 15: mod_base = OTHER; note = 2'-O-methyluridine-3'-phosphate
  modified_base 16: mod_base = OTHER; note = 2'-O-methylguanosine-3'-phosphate
  modified_base 17: mod_base = OTHER; note = 2'-O-methyladenosine-3'-phosphate
  modified_base 18: mod_base = OTHER; note = 2'-O-methylcytidine-3'-phosphate
  modified_base 19: mod_base = OTHER; note = 2'-O-methyluridine-3'-phosphate
  modified_base 20: mod_base = OTHER; note = 2'-O-methylguanosine-3'-phosphate
  modified_base 21: mod_base = OTHER; note = 2'-O-methylguanosine-3'-phosphorothioate
  modified_base 22: mod_base = OTHER; note = 2'-O-methylguanosine-3'-phosphorothioate
  modified_base 23: mod_base = OTHER; note = 2'-O-methylcytidine
  misc_feature 1: note = RNA
  misc_feature 3..4: note = RNA
  misc_feature 6: note = RNA
  misc_feature 8..11: note = RNA
  misc_feature 13..23: note = RNA
  misc_feature 2: note = DNA
  misc_feature 5: note = DNA
  misc_feature 7: note = DNA
  misc_feature 12: note = DNA
tttgagaaatgtcatgactgggc

SEQ ID NO: 346 - DNA, 23 bp, synthetic construct
  source 1..23: mol_type = other DNA
  modified_base 1: mod_base = OTHER; note = 2'-O-methyluridine-3'-phosphorothioate 5'-(E)-Vinylphosphonate
  modified_base 2: mod_base = OTHER; note = 2'-deoxyadenosine-3'-phosphorothioate
  modified_base 3: mod_base = OTHER; note = 2'-O-methylcytidine-3'-phosphate
  modified_base 4: mod_base = OTHER; note = 2'-O-methyluridine-3'-phosphate
  modified_base 6: mod_base = OTHER; note = 2'-O-methyluridine-3'-phosphate
  modified_base 8: mod_base = OTHER; note = 2'-O-methyladenosine-3'-phosphate
  modified_base 9: mod_base = OTHER; note = 2'-O-methylguanosine-3'-phosphate
  modified_base 10: mod_base = OTHER; note = 2'-O-methyladenosine-3'-phosphate
  modified_base 11: mod_base = OTHER; note = 2'-O-methyladenosine-3'-phosphate
  modified_base 13: mod_base = OTHER; note = 2'-O-methyluridine-3'-phosphate
  modified_base 14: mod_base = OTHER; note = 2'-deoxy-2'-fluoroguanosine-3'-phosphate
  modified_base 15: mod_base = OTHER; note = 2'-O-methyluridine-3'-phosphate
  modified_base 16: mod_base = OTHER; note = 2'-O-methylcytidine-3'-phosphate
  modified_base 17: mod_base = OTHER; note = 2'-O-methyladenosine-3'-phosphate
  modified_base 18: mod_base = OTHER; note = 2'-O-methyluridine-3'-phosphate
  modified_base 19: mod_base = OTHER; note = 2'-O-methylguanosine-3'-phosphate
  modified_base 20: mod_base = OTHER; note = 2'-O-methyladenosine-3'-phosphate
  modified_base 21: mod_base = OTHER; note = 2'-O-methylcytidine-3'-phosphorothioate
  modified_base 22: mod_base = OTHER; note = 2'-O-methyluridine-3'-phosphorothioate
  modified_base 23: mod_base = OTHER; note = 2'-O-methylguanosine
  misc_feature 1: note = RNA
  misc_feature 3..4: note = RNA
  misc_feature 6: note = RNA
  misc_feature 8..11: note = RNA
  misc_feature 13..23: note = RNA
  misc_feature 2: note = DNA
  misc_feature 5: note = DNA
  misc_feature 7: note = DNA
  misc_feature 12: note = DNA
tactttgagaaatgtcatgactg

SEQ ID NO: 347 - DNA, 23 bp, synthetic construct
  source 1..23: mol_type = other DNA
  modified_base 1: mod_base = OTHER; note = 2'-O-methyluridine-3'-phosphorothioate 5'-(E)-Vinylphosphonate
  modified_base 2: mod_base = OTHER; note = 2'-deoxyadenosine-3'-phosphorothioate
  modified_base 3: mod_base = OTHER; note = 2'-O-methyladenosine-3'-phosphate
  modified_base 4: mod_base = OTHER; note = 2'-O-methyladenosine-3'-phosphate
  modified_base 6: mod_base = OTHER; note = 2'-O-methyluridine-3'-phosphate
  modified_base 8: mod_base = OTHER; note = 2'-O-methyluridine-3'-phosphate
  modified_base 9: mod_base = OTHER; note = 2'-O-methylguanosine-3'-phosphate
  modified_base 10: mod_base = OTHER; note = 2'-O-methyladenosine-3'-phosphate
  modified_base 11: mod_base = OTHER; note = 2'-O-methylguanosine-3'-phosphate
  modified_base 13: mod_base = OTHER; note = 2'-O-methyladenosine-3'-phosphate
  modified_base 14: mod_base = OTHER; note = 2'-deoxy-2'-fluoroadenosine-3'-phosphate
  modified_base 15: mod_base = OTHER; note = 2'-O-methyluridine-3'-phosphate
  modified_base 16: mod_base = OTHER; note = 2'-O-methylguanosine-3'-phosphate
  modified_base 17: mod_base = OTHER; note = 2'-O-methyluridine-3'-phosphate
  modified_base 18: mod_base = OTHER; note = 2'-O-methylcytidine-3'-phosphate
  modified_base 19: mod_base = OTHER; note = 2'-O-methyladenosine-3'-phosphate
  modified_base 20: mod_base = OTHER; note = 2'-O-methyluridine-3'-phosphate
  modified_base 21: mod_base = OTHER; note = 2'-O-methylguanosine-3'-phosphorothioate
  modified_base 22: mod_base = OTHER; note = 2'-O-methyladenosine-3'-phosphorothioate
  modified_base 23: mod_base = OTHER; note = 2'-O-methylcytidine
  misc_feature 1: note = RNA
  misc_feature 3..4: note = RNA
  misc_feature 6: note = RNA
  misc_feature 8..11: note = RNA
  misc_feature 13..23: note = RNA
  misc_feature 2: note = DNA
  misc_feature 5: note = DNA
  misc_feature 7: note = DNA
  misc_feature 12: note = DNA
taaactttgagaaatgtcatgac

SEQ ID NO: 348 - DNA, 23 bp, synthetic construct
  source 1..23: mol_type = other DNA
  modified_base 1: mod_base = OTHER; note = 2'-O-methyluridine-3'-phosphorothioate 5'-(E)-Vinylphosphonate
  modified_base 2: mod_base = OTHER; note = 2'-deoxycytidine-3'-phosphorothioate
  modified_base 3: mod_base = OTHER; note = 2'-O-methyladenosine-3'-phosphate
  modified_base 4: mod_base = OTHER; note = 2'-O-methyladenosine-3'-phosphate
  modified_base 6: mod_base = OTHER; note = 2'-O-methylcytidine-3'-phosphate
  modified_base 8: mod_base = OTHER; note = 2'-O-methylcytidine-3'-phosphate
  modified_base 9: mod_base = OTHER; note = 2'-O-methyluridine-3'-phosphate
  modified_base 10: mod_base = OTHER; note = 2'-O-methylguanosine-3'-phosphate
  modified_base 11: mod_base = OTHER; note = 2'-O-methylcytidine-3'-phosphate
  modified_base 13: mod_base = OTHER; note = 2'-O-methylguanosine-3'-phosphate
  modified_base 14: mod_base = OTHER; note = 2'-deoxy-2'-fluoroadenosine-3'-phosphate
  modified_base 15: mod_base = OTHER; note = 2'-O-methyluridine-3'-phosphate
  modified_base 16: mod_base = OTHER; note = 2'-O-methylguanosine-3'-phosphate
  modified_base 17: mod_base = OTHER; note = 2'-O-methylguanosine-3'-phosphate
  modified_base 18: mod_base = OTHER; note = 2'-O-methyladenosine-3'-phosphate
  modified_base 19: mod_base = OTHER; note = 2'-O-methyladenosine-3'-phosphate
  modified_base 20: mod_base = OTHER; note = 2'-O-methylguanosine-3'-phosphate
  modified_base 21: mod_base = OTHER; note = 2'-O-methyladenosine-3'-phosphorothioate
  modified_base 22: mod_base = OTHER; note = 2'-O-methylcytidine-3'-phosphorothioate
  modified_base 23: mod_base = OTHER; note = 2'-O-methyluridine
  misc_feature 1: note = RNA
  misc_feature 3..4: note = RNA
  misc_feature 6: note = RNA
  misc_feature 8..11: note = RNA
  misc_feature 13..23: note = RNA
  misc_feature 2: note = DNA
  misc_feature 5: note = DNA
  misc_feature 7: note = DNA
  misc_feature 12: note = DNA
tcaatcactgctgatggaagact

SEQ ID NO: 349 - DNA, 23 bp, synthetic construct
  source 1..23: mol_type = other DNA
  modified_base 1: mod_base = OTHER; note = 2'-O-methyluridine-3'-phosphorothioate 5'-(E)-Vinylphosphonate
  modified_base 2: mod_base = OTHER; note = 2'-deoxyadenosine-3'-phosphorothioate
  modified_base 3: mod_base = OTHER; note = 2'-O-methylcytidine-3'-phosphate
  modified_base 4: mod_base = OTHER; note = 2'-O-methyluridine-3'-phosphate
  modified_base 6: mod_base = OTHER; note = 2'-O-methylcytidine-3'-phosphate
  modified_base 8: mod_base = OTHER; note = 2'-O-methyladenosine-3'-phosphate
  modified_base 9: mod_base = OTHER; note = 2'-O-methyluridine-3'-phosphate
  modified_base 10: mod_base = OTHER; note = 2'-O-methylcytidine-3'-phosphate
  modified_base 11: mod_base = OTHER; note = 2'-O-methyladenosine-3'-phosphate
  modified_base 13: mod_base = OTHER; note = 2'-O-methyluridine-3'-phosphate
  modified_base 14: mod_base = OTHER; note = 2'-deoxy-2'-fluoroguanosine-3'-phosphate
  modified_base 15: mod_base = OTHER; note = 2'-O-methylcytidine-3'-phosphate
  modified_base 16: mod_base = OTHER; note = 2'-O-methyluridine-3'-phosphate
  modified_base 17: mod_base = OTHER; note = 2'-O-methylguanosine-3'-phosphate
  modified_base 18: mod_base = OTHER; note = 2'-O-methyladenosine-3'-phosphate
  modified_base 19: mod_base = OTHER; note = 2'-O-methyluridine-3'-phosphate
  modified_base 20: mod_base = OTHER; note = 2'-O-methylguanosine-3'-phosphate
  modified_base 21: mod_base = OTHER; note = 2'-O-methylguanosine-3'-phosphorothioate
  modified_base 22: mod_base = OTHER; note = 2'-O-methyladenosine-3'-phosphorothioate
  modified_base 23: mod_base = OTHER; note = 2'-O-methyladenosine
  misc_feature 1: note = RNA
  misc_feature 3..4: note = RNA
  misc_feature 6: note = RNA
  misc_feature 8..11: note = RNA
  misc_feature 13..23: note = RNA
  misc_feature 2: note = DNA
  misc_feature 5: note = DNA
  misc_feature 7: note = DNA
  misc_feature 12: note = DNA
tacttcaatcactgctgatggaa

SEQ ID NO: 350 - DNA, 23 bp, synthetic construct
  source 1..23: mol_type = other DNA
  modified_base 1: mod_base = OTHER; note = 2'-O-methyluridine-3'-phosphorothioate 5'-(E)-Vinylphosphonate
  modified_base 2: mod_base = OTHER; note = 2'-deoxyadenosine-3'-phosphorothioate
  modified_base 3: mod_base = OTHER; note = 2'-O-methyluridine-3'-phosphate
  modified_base 4: mod_base = OTHER; note = 2'-O-methyladenosine-3'-phosphate
  modified_base 6: mod_base = OTHER; note = 2'-O-methyluridine-3'-phosphate
  modified_base 8: mod_base = OTHER; note = 2'-O-methylcytidine-3'-phosphate
  modified_base 9: mod_base = OTHER; note = 2'-O-methyladenosine-3'-phosphate
  modified_base 10: mod_base = OTHER; note = 2'-O-methyladenosine-3'-phosphate
  modified_base 11: mod_base = OTHER; note = 2'-O-methyluridine-3'-phosphate
  modified_base 13: mod_base = OTHER; note = 2'-O-methyladenosine-3'-phosphate
  modified_base 14: mod_base = OTHER; note = 2'-deoxy-2'-fluorocytidine-3'-phosphate
  modified_base 15: mod_base = OTHER; note = 2'-O-methyluridine-3'-phosphate
  modified_base 16: mod_base = OTHER; note = 2'-O-methylguanosine-3'-phosphate
  modified_base 17: mod_base = OTHER; note = 2'-O-methylcytidine-3'-phosphate
  modified_base 18: mod_base = OTHER; note = 2'-O-methyluridine-3'-phosphate
  modified_base 19: mod_base = OTHER; note = 2'-O-methylguanosine-3'-phosphate
  modified_base 20: mod_base = OTHER; note = 2'-O-methyladenosine-3'-phosphate
  modified_base 21: mod_base = OTHER; note = 2'-O-methyluridine-3'-phosphorothioate
  modified_base 22: mod_base = OTHER; note = 2'-O-methylguanosine-3'-phosphorothioate
  modified_base 23: mod_base = OTHER; note = 2'-O-methylguanosine
  misc_feature 1: note = RNA
  misc_feature 3..4: note = RNA
  misc_feature 6: note = RNA
  misc_feature 8..11: note = RNA
  misc_feature 13..23: note = RNA
  misc_feature 2: note = DNA
  misc_feature 5: note = DNA
  misc_feature 7: note = DNA
  misc_feature 12: note = DNA
tatacttcaatcactgctgatgg

SEQ ID NO: 351 - DNA, 23 bp, synthetic construct
  source 1..23: mol_type = other DNA
  modified_base 1: mod_base = OTHER; note = 2'-O-methyluridine-3'-phosphorothioate 5'-(E)-Vinylphosphonate
  modified_base 2: mod_base = OTHER; note = 2'-deoxycytidine-3'-phosphorothioate
  modified_base 3: mod_base = OTHER; note = 2'-O-methyladenosine-3'-phosphate
  modified_base 4: mod_base = OTHER; note = 2'-O-methylguanosine-3'-phosphate
  modified_base 6: mod_base = OTHER; note = 2'-O-methyluridine-3'-phosphate
  modified_base 8: mod_base = OTHER; note = 2'-O-methylcytidine-3'-phosphate
  modified_base 9: mod_base = OTHER; note = 2'-O-methyluridine-3'-phosphate
  modified_base 10: mod_base = OTHER; note = 2'-O-methyluridine-3'-phosphate
  modified_base 11: mod_base = OTHER; note = 2'-O-methylcytidine-3'-phosphate
  modified_base 13: mod_base = OTHER; note = 2'-O-methyladenosine-3'-phosphate
  modified_base 14: mod_base = OTHER; note = 2'-deoxy-2'-fluorouridine-3'-phosphate
  modified_base 15: mod_base = OTHER; note = 2'-O-methylcytidine-3'-phosphate
  modified_base 16: mod_base = OTHER; note = 2'-O-methyladenosine-3'-phosphate
  modified_base 17: mod_base = OTHER; note = 2'-O-methylcytidine-3'-phosphate
  modified_base 18: mod_base = OTHER; note = 2'-O-methyluridine-3'-phosphate
  modified_base 19: mod_base = OTHER; note = 2'-O-methylguanosine-3'-phosphate
  modified_base 20: mod_base = OTHER; note = 2'-O-methylcytidine-3'-phosphate
  modified_base 21: mod_base = OTHER; note = 2'-O-methyluridine-3'-phosphorothioate
  modified_base 22: mod_base = OTHER; note = 2'-O-methylguanosine-3'-phosphorothioate
  modified_base 23: mod_base = OTHER; note = 2'-O-methyladenosine
  misc_feature 1: note = RNA
  misc_feature 3..4: note = RNA
  misc_feature 6: note = RNA
  misc_feature 8..11: note = RNA
  misc_feature 13..23: note = RNA
  misc_feature 2: note = DNA
  misc_feature 5: note = DNA
  misc_feature 7: note = DNA
  misc_feature 12: note = DNA
tcagatacttcaatcactgctga

SEQ ID NO: 352 - DNA, 23 bp, synthetic construct
  source 1..23: mol_type = other DNA
  modified_base 1: mod_base = OTHER; note = 2'-O-methyluridine-3'-phosphorothioate 5'-(E)-Vinylphosphonate
  modified_base 2: mod_base = OTHER; note = 2'-deoxyadenosine-3'-phosphorothioate
  modified_base 3: mod_base = OTHER; note = 2'-O-methylcytidine-3'-phosphate
  modified_base 4: mod_base = OTHER; note = 2'-O-methyladenosine-3'-phosphate
  modified_base 6: mod_base = OTHER; note = 2'-O-methyladenosine-3'-phosphate
  modified_base 8: mod_base = OTHER; note = 2'-O-methyladenosine-3'-phosphate
  modified_base 9: mod_base = OTHER; note = 2'-O-methylcytidine-3'-phosphate
  modified_base 10: mod_base = OTHER; note = 2'-O-methyluridine-3'-phosphate
  modified_base 11: mod_base = OTHER; note = 2'-O-methyluridine-3'-phosphate
  modified_base 13: mod_base = OTHER; note = 2'-O-methyladenosine-3'-phosphate
  modified_base 14: mod_base = OTHER; note = 2'-deoxy-2'-fluoroadenosine-3'-phosphate
  modified_base 15: mod_base = OTHER; note = 2'-O-methyluridine-3'-phosphate
  modified_base 16: mod_base = OTHER; note = 2'-O-methylcytidine-3'-phosphate
  modified_base 17: mod_base = OTHER; note = 2'-O-methyladenosine-3'-phosphate
  modified_base 18: mod_base = OTHER; note = 2'-O-methylcytidine-3'-phosphate
  modified_base 19: mod_base = OTHER; note = 2'-O-methyluridine-3'-phosphate
  modified_base 20: mod_base = OTHER; note = 2'-O-methylguanosine-3'-phosphate
  modified_base 21: mod_base = OTHER; note = 2'-O-methylcytidine-3'-phosphorothioate
  modified_base 22: mod_base = OTHER; note = 2'-O-methyluridine-3'-phosphorothioate
  modified_base 23: mod_base = OTHER; note = 2'-O-methylguanosine
  misc_feature 1: note = RNA
  misc_feature 3..4: note = RNA
  misc_feature 6: note = RNA
  misc_feature 8..11: note = RNA
  misc_feature 13..23: note = RNA
  misc_feature 2: note = DNA
  misc_feature 5: note = DNA
  misc_feature 7: note = DNA
  misc_feature 12: note = DNA
tacagatacttcaatcactgctg

SEQ ID NO: 353 - DNA, 23 bp, synthetic construct
  source 1..23: mol_type = other DNA
  modified_base 1: mod_base = OTHER; note = 2'-O-methyluridine-3'-phosphorothioate 5'-(E)-Vinylphosphonate
  modified_base 2: mod_base = OTHER; note = 2'-deoxycytidine-3'-phosphorothioate
  modified_base 3: mod_base = OTHER; note = 2'-O-methyladenosine-3'-phosphate
  modified_base 4: mod_base = OTHER; note = 2'-O-methyluridine-3'-phosphate
  modified_base 6: mod_base = OTHER; note = 2'-O-methyluridine-3'-phosphate
  modified_base 8: mod_base = OTHER; note = 2'-O-methyluridine-3'-phosphate
  modified_base 9: mod_base = OTHER; note = 2'-O-methyluridine-3'-phosphate
  modified_base 10: mod_base = OTHER; note = 2'-O-methylcytidine-3'-phosphate
  modified_base 11: mod_base = OTHER; note = 2'-O-methyladenosine-3'-phosphate
  modified_base 13: mod_base = OTHER; note = 2'-O-methyluridine-3'-phosphate
  modified_base 14: mod_base = OTHER; note = 2'-deoxy-2'-fluorouridine-3'-phosphate
  modified_base 15: mod_base = OTHER; note = 2'-O-methylcytidine-3'-phosphate
  modified_base 16: mod_base = OTHER; note = 2'-O-methyladenosine-3'-phosphate
  modified_base 17: mod_base = OTHER; note = 2'-O-methylguanosine-3'-phosphate
  modified_base 18: mod_base = OTHER; note = 2'-O-methyluridine-3'-phosphate
  modified_base 19: mod_base = OTHER; note = 2'-O-methylguanosine-3'-phosphate
  modified_base 20: mod_base = OTHER; note = 2'-O-methyladenosine-3'-phosphate
  modified_base 21: mod_base = OTHER; note = 2'-O-methyladenosine-3'-phosphorothioate
  modified_base 22: mod_base = OTHER; note = 2'-O-methyladenosine-3'-phosphorothioate
  modified_base 23: mod_base = OTHER; note = 2'-O-methylguanosine
  misc_feature 1: note = RNA
  misc_feature 3..4: note = RNA
  misc_feature 6: note = RNA
  misc_feature 8..11: note = RNA
  misc_feature 13..23: note = RNA
  misc_feature 2: note = DNA
  misc_feature 5: note = DNA
  misc_feature 7: note = DNA
  misc_feature 12: note = DNA
tcatgtattcacttcagtgaaag

SEQ ID NO: 354 - DNA, 23 bp, synthetic construct
  source 1..23: mol_type = other DNA
  modified_base 1: mod_base = OTHER; note = 2'-O-methyluridine-3'-phosphorothioate 5'-(E)-Vinylphosphonate
  modified_base 2: mod_base = OTHER; note = 2'-deoxyadenosine-3'-phosphorothioate
  modified_base 3: mod_base = OTHER; note = 2'-O-methyladenosine-3'-phosphate
  modified_base 4: mod_base = OTHER; note = 2'-O-methyladenosine-3'-phosphate
  modified_base 6: mod_base = OTHER; note = 2'-O-methyladenosine-3'-phosphate
  modified_base 8: mod_base = OTHER; note = 2'-O-methylguanosine-3'-phosphate
  modified_base 9: mod_base = OTHER; note = 2'-O-methyluridine-3'-phosphate
  modified_base 10: mod_base = OTHER; note = 2'-O-methylguanosine-3'-phosphate
  modified_base 11: mod_base = OTHER; note = 2'-O-methylguanosine-3'-phosphate
  modified_base 13: mod_base = OTHER; note = 2'-O-methyladenosine-3'-phosphate
  modified_base 14: mod_base = OTHER; note = 2'-deoxy-2'-fluoroguanosine-3'-phosphate
  modified_base 15: mod_base = OTHER; note = 2'-O-methyluridine-3'-phosphate
  modified_base 16: mod_base = OTHER; note = 2'-O-methylcytidine-3'-phosphate
  modified_base 17: mod_base = OTHER; note = 2'-O-methyladenosine-3'-phosphate
  modified_base 18: mod_base = OTHER; note = 2'-O-methylcytidine-3'-phosphate
  modified_base 19: mod_base = OTHER; note = 2'-O-methyluridine-3'-phosphate
  modified_base 20: mod_base = OTHER; note = 2'-O-methyluridine-3'-phosphate
  modified_base 21: mod_base = OTHER; note = 2'-O-methyladenosine-3'-phosphorothioate
  modified_base 22: mod_base = OTHER; note = 2'-O-methylguanosine-3'-phosphorothioate
  modified_base 23: mod_base = OTHER; note = 2'-O-methylguanosine
  misc_feature 1: note = RNA
  misc_feature 3..4: note = RNA
  misc_feature 6: note = RNA
  misc_feature 8..11: note = RNA
  misc_feature 13..23: note = RNA
  misc_feature 2: note = DNA
  misc_feature 5: note = DNA
  misc_feature 7: note = DNA
  misc_feature 12: note = DNA
taaataagtggtagtcacttagg

SEQ ID NO: 355 - DNA, 23 bp, synthetic construct
  source 1..23: mol_type = other DNA
  modified_base 1: mod_base = OTHER; note = 2'-O-methyluridine-3'-phosphorothioate 5'-(E)-Vinylphosphonate
  modified_base 2: mod_base = OTHER; note = 2'-deoxyguanosine-3'-phosphorothioate
  modified_base 3: mod_base = OTHER; note = 2'-O-methyladenosine-3'-phosphate
  modified_base 4: mod_base = OTHER; note = 2'-O-methyluridine-3'-phosphate
  modified_base 6: mod_base = OTHER; note = 2'-O-methyluridine-3'-phosphate
  modified_base 8: mod_base = OTHER; note = 2'-O-methylguanosine-3'-phosphate
  modified_base 9: mod_base = OTHER; note = 2'-O-methyladenosine-3'-phosphate
  modified_base 10: mod_base = OTHER; note = 2'-O-methyladenosine-3'-phosphate
  modified_base 11: mod_base = OTHER; note = 2'-O-methyladenosine-3'-phosphate
  modified_base 13: mod_base = OTHER; note = 2'-O-methyladenosine-3'-phosphate
  modified_base 14: mod_base = OTHER; note = 2'-deoxy-2'-fluoroadenosine-3'-phosphate
  modified_base 15: mod_base = OTHER; note = 2'-O-methylguanosine-3'-phosphate
  modified_base 16: mod_base = OTHER; note = 2'-O-methyluridine-3'-phosphate
  modified_base 17: mod_base = OTHER; note = 2'-O-methylguanosine-3'-phosphate
  modified_base 18: mod_base = OTHER; note = 2'-O-methylguanosine-3'-phosphate
  modified_base 19: mod_base = OTHER; note = 2'-O-methyluridine-3'-phosphate
  modified_base 20: mod_base = OTHER; note = 2'-O-methyladenosine-3'-phosphate
  modified_base 21: mod_base = OTHER; note = 2'-O-methylguanosine-3'-phosphorothioate
  modified_base 22: mod_base = OTHER; note = 2'-O-methyluridine-3'-phosphorothioate
  modified_base 23: mod_base = OTHER; note = 2'-O-methylcytidine
  misc_feature 1: note = RNA
  misc_feature 3..4: note = RNA
  misc_feature 6: note = RNA
  misc_feature 8..11: note = RNA
  misc_feature 13..23: note = RNA
  misc_feature 2: note = DNA
  misc_feature 5: note = DNA
  misc_feature 7: note = DNA
  misc_feature 12: note = DNA
tgatttagaaataagtggtagtc

SEQ ID NO: 356 - DNA, 23 bp, synthetic construct
  source 1..23: mol_type = other DNA
  modified_base 1: mod_base = OTHER; note = 2'-O-methyluridine-3'-phosphorothioate 5'-(E)-Vinylphosphonate
  modified_base 2: mod_base = OTHER; note = 2'-deoxycytidine-3'-phosphorothioate
  modified_base 3: mod_base = OTHER; note = 2'-O-methyladenosine-3'-phosphate
  modified_base 4: mod_base = OTHER; note = 2'-O-methyluridine-3'-phosphate
  modified_base 6: mod_base = OTHER; note = 2'-O-methylguanosine-3'-phosphate
  modified_base 8: mod_base = OTHER; note = 2'-O-methyluridine-3'-phosphate
  modified_base 9: mod_base = OTHER; note = 2'-O-methyluridine-3'-phosphate
  modified_base 10: mod_base = OTHER; note = 2'-O-methylcytidine-3'-phosphate
  modified_base 11: mod_base = OTHER; note = 2'-O-methyladenosine-3'-phosphate
  modified_base 13: mod_base = OTHER; note = 2'-O-methylguanosine-3'-phosphate
  modified_base 14: mod_base = OTHER; note = 2'-deoxy-2'-fluorocytidine-3'-phosphate
  modified_base 15: mod_base = OTHER; note = 2'-O-methyluridine-3'-phosphate
  modified_base 16: mod_base = OTHER; note = 2'-O-methylcytidine-3'-phosphate
  modified_base 17: mod_base = OTHER; note = 2'-O-methyladenosine-3'-phosphate
  modified_base 18: mod_base = OTHER; note = 2'-O-methylcytidine-3'-phosphate
  modified_base 19: mod_base = OTHER; note = 2'-O-methyladenosine-3'-phosphate
  modified_base 20: mod_base = OTHER; note = 2'-O-methyluridine-3'-phosphate
  modified_base 21: mod_base = OTHER; note = 2'-O-methyladenosine-3'-phosphorothioate
  modified_base 22: mod_base = OTHER; note = 2'-O-methyluridine-3'-phosphorothioate
  modified_base 23: mod_base = OTHER; note = 2'-O-methyluridine
  misc_feature 1: note = RNA
  misc_feature 3..4: note = RNA
  misc_feature 6: note = RNA
  misc_feature 8..11: note = RNA
  misc_feature 13..23: note = RNA
  misc_feature 2: note = DNA
  misc_feature 5: note = DNA
  misc_feature 7: note = DNA
  misc_feature 12: note = DNA
tcatagtttcatgctcacatatt

SEQ ID NO: 357 - DNA, 23 bp, synthetic construct
  source 1..23: mol_type = other DNA
  modified_base 1: mod_base = OTHER; note = 2'-O-methyluridine-3'-phosphorothioate 5'-(E)-Vinylphosphonate
  modified_base 2: mod_base = OTHER; note = 2'-deoxyguanosine-3'-phosphorothioate
  modified_base 3: mod_base = OTHER; note = 2'-O-methyluridine-3'-phosphate
  modified_base 4: mod_base = OTHER; note = 2'-O-methyladenosine-3'-phosphate
  modified_base 6: mod_base = OTHER; note = 2'-O-methyluridine-3'-phosphate
  modified_base 8: mod_base = OTHER; note = 2'-O-methyladenosine-3'-phosphate
  modified_base 9: mod_base = OTHER; note = 2'-O-methyluridine-3'-phosphate
  modified_base 10: mod_base = OTHER; note = 2'-O-methyladenosine-3'-phosphate
  modified_base 11: mod_base = OTHER; note = 2'-O-methylguanosine-3'-phosphate
  modified_base 13: mod_base = OTHER; note = 2'-O-methyluridine-3'-phosphate
  modified_base 14: mod_base = OTHER; note = 2'-deoxy-2'-fluoroguanosine-3'-phosphate
  modified_base 15: mod_base = OTHER; note = 2'-O-methylcytidine-3'-phosphate
  modified_base 16: mod_base = OTHER; note = 2'-O-methyladenosine-3'-phosphate
  modified_base 17: mod_base = OTHER; note = 2'-O-methyluridine-3'-phosphate
  modified_base 18: mod_base = OTHER; note = 2'-O-methyladenosine-3'-phosphate
  modified_base 19: mod_base = OTHER; note = 2'-O-methylguanosine-3'-phosphate
  modified_base 20: mod_base = OTHER; note = 2'-O-methyluridine-3'-phosphate
  modified_base 21: mod_base = OTHER; note = 2'-O-methyluridine-3'-phosphorothioate
  modified_base 22: mod_base = OTHER; note = 2'-O-methyluridine-3'-phosphorothioate
  modified_base 23: mod_base = OTHER; note = 2'-O-methylcytidine
  misc_feature 1: note = RNA
  misc_feature 3..4: note = RNA
  misc_feature 6: note = RNA
  misc_feature 8..11: note = RNA
  misc_feature 13..23: note = RNA
  misc_feature 2: note = DNA
  misc_feature 5: note = DNA
  misc_feature 7: note = DNA
  misc_feature 12: note = DNA
tgtatttataggtgcatagtttc

SEQ ID NO: 358 - DNA, 23 bp, synthetic construct
  source 1..23: mol_type = other DNA
  modified_base 1: mod_base = OTHER; note = 2'-O-methyluridine-3'-phosphorothioate 5'-(E)-Vinylphosphonate
  modified_base 2: mod_base = OTHER; note = 2'-deoxy-2'-fluorouridine-3'-phosphorothioate
  modified_base 3: mod_base = OTHER; note = 2'-O-methylguanosine-3'-phosphate
  modified_base 4: mod_base = OTHER; note = 2'-O-methyladenosine-3'-phosphate
  modified_base 6: mod_base = OTHER; note = 2'-O-methyluridine-3'-phosphate
  modified_base 7: mod_base = OTHER; note = Thymidine-glycol nucleic acid (GNA), S-Isomer
  modified_base 8: mod_base = OTHER; note = 2'-O-methylcytidine-3'-phosphate
  modified_base 9: mod_base = OTHER; note = 2'-O-methylcytidine-3'-phosphate
  modified_base 10: mod_base = OTHER; note = 2'-O-methyluridine-3'-phosphate
  modified_base 11: mod_base = OTHER; note = 2'-O-methyluridine-3'-phosphate
  modified_base 12: mod_base = OTHER; note = 2'-O-methyluridine-3'-phosphate
  modified_base 13: mod_base = OTHER; note = 2'-O-methyladenosine-3'-phosphate
  modified_base 14: mod_base = OTHER; note = 2'-deoxy-2'-fluorocytidine-3'-phosphate
  modified_base 15: mod_base = OTHER; note = 2'-O-methyladenosine-3'-phosphate
  modified_base 16: mod_base = OTHER; note = 2'-deoxy-2'-fluorocytidine-3'-phosphate
  modified_base 17: mod_base = OTHER; note = 2'-O-methylcytidine-3'-phosphate
  modified_base 18: mod_base = OTHER; note = 2'-O-methyladenosine-3'-phosphate
  modified_base 19: mod_base = OTHER; note = 2'-O-methylcytidine-3'-phosphate
  modified_base 20: mod_base = OTHER; note = 2'-O-methyladenosine-3'-phosphate
  modified_base 21: mod_base = OTHER; note = 2'-O-methylcytidine-3'-phosphorothioate
  modified_base 22: mod_base = OTHER; note = 2'-O-methyluridine-3'-phosphorothioate
  modified_base 23: mod_base = OTHER; note = 2'-O-methylguanosine
  misc_feature 1..4: note = RNA
  misc_feature 6..23: note = RNA
  misc_feature 5: note = DNA
ttgaattcctttacaccacactg

SEQ ID NO: 359 - DNA, 23 bp, synthetic construct
  source 1..23: mol_type = other DNA
  modified_base 1: mod_base = OTHER; note = 2'-O-methyluridine-3'-phosphorothioate 5'-(E)-Vinylphosphonate
  modified_base 2: mod_base = OTHER; note = 2'-deoxy-2'-fluoroguanosine-3'-phosphorothioate
  modified_base 3: mod_base = OTHER; note = 2'-O-methylguanosine-3'-phosphate
  modified_base 4: mod_base = OTHER; note = 2'-O-methyladenosine-3'-phosphate
  modified_base 6: mod_base = OTHER; note = 2'-O-methylcytidine-3'-phosphate
  modified_base 7: mod_base = OTHER; note = Thymidine-glycol nucleic acid (GNA), S-Isomer
  modified_base 8: mod_base = OTHER; note = 2'-O-methylguanosine-3'-phosphate
  modified_base 9: mod_base = OTHER; note = 2'-O-methyladenosine-3'-phosphate
  modified_base 10: mod_base = OTHER; note = 2'-O-methylguanosine-3'-phosphate
  modified_base 11: mod_base = OTHER; note = 2'-O-methylcytidine-3'-phosphate
  modified_base 12: mod_base = OTHER; note = 2'-O-methyladenosine-3'-phosphate
  modified_base 13: mod_base = OTHER; note = 2'-O-methylcytidine-3'-phosphate
  modified_base 14: mod_base = OTHER; note = 2'-deoxy-2'-fluorouridine-3'-phosphate
  modified_base 15: mod_base = OTHER; note = 2'-O-methyluridine-3'-phosphate
  modified_base 16: mod_base = OTHER; note = 2'-deoxy-2'-fluoroguanosine-3'-phosphate
  modified_base 17: mod_base = OTHER; note = 2'-O-methyluridine-3'-phosphate
  modified_base 18: mod_base = OTHER; note = 2'-O-methyladenosine-3'-phosphate
  modified_base 19: mod_base = OTHER; note = 2'-O-methylcytidine-3'-phosphate
  modified_base 20: mod_base = OTHER; note = 2'-O-methyladenosine-3'-phosphate
  modified_base 21: mod_base = OTHER; note = 2'-O-methylguanosine-3'-phosphorothioate
  modified_base 22: mod_base = OTHER; note = 2'-O-methylguanosine-3'-phosphorothioate
  modified_base 23: mod_base = OTHER; note = 2'-O-methyladenosine
  misc_feature 1..4: note = RNA
  misc_feature 6..23: note = RNA
  misc_feature 5: note = DNA
tggaactgagcacttgtacagga

SEQ ID NO: 360 - DNA, 23 bp, synthetic construct
  source 1..23: mol_type = other DNA
  modified_base 1: mod_base = OTHER; note = 2'-O-methyluridine-3'-phosphorothioate 5'-(E)-Vinylphosphonate
  modified_base 2: mod_base = OTHER; note = 2'-deoxy-2'-fluorouridine-3'-phosphorothioate
  modified_base 3: mod_base = OTHER; note = 2'-O-methyluridine-3'-phosphate
  modified_base 4: mod_base = OTHER; note = 2'-O-methylguanosine-3'-phosphate
  modified_base 6: mod_base = OTHER; note = 2'-O-methyladenosine-3'-phosphate
  modified_base 7: mod_base = OTHER; note = Adenosine-glycol nucleic acid (GNA), S-isomer
  modified_base 8: mod_base = OTHER; note = 2'-O-methylcytidine-3'-phosphate
  modified_base 9: mod_base = OTHER; note = 2'-O-methyluridine-3'-phosphate
  modified_base 10: mod_base = OTHER; note = 2'-O-methylguanosine-3'-phosphate
  modified_base 11: mod_base = OTHER; note = 2'-O-methyladenosine-3'-phosphate
  modified_base 12: mod_base = OTHER; note = 2'-O-methylguanosine-3'-phosphate
  modified_base 13: mod_base = OTHER; note = 2'-O-methylcytidine-3'-phosphate
  modified_base 14: mod_base = OTHER; note = 2'-deoxy-2'-fluoroadenosine-3'-phosphate
  modified_base 15: mod_base = OTHER; note = 2'-O-methylcytidine-3'-phosphate
  modified_base 16: mod_base = OTHER; note = 2'-deoxy-2'-fluorouridine-3'-phosphate
  modified_base 17: mod_base = OTHER; note = 2'-O-methyluridine-3'-phosphate
  modified_base 18: mod_base = OTHER; note = 2'-O-methylguanosine-3'-phosphate
  modified_base 19: mod_base = OTHER; note = 2'-O-methyluridine-3'-phosphate
  modified_base 20: mod_base = OTHER; note = 2'-O-methyladenosine-3'-phosphate
  modified_base 21: mod_base = OTHER; note = 2'-O-methylcytidine-3'-phosphorothioate
  modified_base 22: mod_base = OTHER; note = 2'-O-methyladenosine-3'-phosphorothioate
  modified_base 23: mod_base = OTHER; note = 2'-O-methylguanosine
  misc_feature 1..4: note = RNA
  misc_feature 6..23: note = RNA
  misc_feature 5: note = DNA
tttggaactgagcacttgtacag

SEQ ID NO: 361 - DNA, 23 bp, synthetic construct
  source 1..23: mol_type = other DNA
  modified_base 1: mod_base = OTHER; note = 2'-O-methyluridine-3'-phosphorothioate 5'-(E)-Vinylphosphonate
  modified_base 2: mod_base = OTHER; note = 2'-deoxy-2'-fluorouridine-3'-phosphorothioate
  modified_base 3: mod_base = OTHER; note = 2'-O-methyluridine-3'-phosphate
  modified_base 4: mod_base = OTHER; note = 2'-O-methylcytidine-3'-phosphate
  modified_base 6: mod_base = OTHER; note = 2'-O-methyladenosine-3'-phosphate
  modified_base 7: mod_base = OTHER; note = Thymidine-glycol nucleic acid (GNA), S-Isomer
  modified_base 8: mod_base = OTHER; note = 2'-O-methylcytidine-3'-phosphate
  modified_base 9: mod_base = OTHER; note = 2'-O-methyladenosine-3'-phosphate
  modified_base 10: mod_base = OTHER; note = 2'-O-methylcytidine-3'-phosphate
  modified_base 11: mod_base = OTHER; note = 2'-O-methyluridine-3'-phosphate
  modified_base 12: mod_base = OTHER; note = 2'-O-methylguanosine-3'-phosphate
  modified_base 13: mod_base = OTHER; note = 2'-O-methylcytidine-3'-phosphate
  modified_base 14: mod_base = OTHER; note = 2'-deoxy-2'-fluorouridine-3'-phosphate
  modified_base 15: mod_base = OTHER; note = 2'-O-methylguanosine-3'-phosphate
  modified_base 16: mod_base = OTHER; note = 2'-deoxy-2'-fluoroadenosine-3'-phosphate
  modified_base 17: mod_base = OTHER; note = 2'-O-methyluridine-3'-phosphate
  modified_base 18: mod_base = OTHER; note = 2'-O-methylguanosine-3'-phosphate
  modified_base 19: mod_base = OTHER; note = 2'-O-methylguanosine-3'-phosphate
  modified_base 20: mod_base = OTHER; note = 2'-O-methyladenosine-3'-phosphate
  modified_base 21: mod_base = OTHER; note = 2'-O-methyladenosine-3'-phosphorothioate
  modified_base 22: mod_base = OTHER; note = 2'-O-methylguanosine-3'-phosphorothioate
  modified_base 23: mod_base = OTHER; note = 2'-O-methyladenosine
  misc_feature 1..4: note = RNA
  misc_feature 6..23: note = RNA
  misc_feature 5: note = DNA
tttcaatcactgctgatggaaga

SEQ ID NO: 362 - DNA, 23 bp, synthetic construct
  source 1..23: mol_type = other DNA
  modified_base 1: mod_base = OTHER; note = 2'-O-methyluridine-3'-phosphorothioate 5'-(E)-Vinylphosphonate
  modified_base 2: mod_base = OTHER; note = 2'-deoxy-2'-fluoroadenosine-3'-phosphorothioate
  modified_base 3: mod_base = OTHER; note = 2'-O-methylcytidine-3'-phosphate
  modified_base 4: mod_base = OTHER; note = 2'-O-methyluridine-3'-phosphate
  modified_base 6: mod_base = OTHER; note = 2'-O-methylcytidine-3'-phosphate
  modified_base 7: mod_base = OTHER; note = Adenosine-glycol nucleic acid (GNA), S-isomer
  modified_base 8: mod_base = OTHER; note = 2'-O-methyladenosine-3'-phosphate
  modified_base 9: mod_base = OTHER; note = 2'-O-methyluridine-3'-phosphate
  modified_base 10: mod_base = OTHER; note = 2'-O-methylcytidine-3'-phosphate
  modified_base 11: mod_base = OTHER; note = 2'-O-methyladenosine-3'-phosphate
  modified_base 12: mod_base = OTHER; note = 2'-O-methylcytidine-3'-phosphate
  modified_base 13: mod_base = OTHER; note = 2'-O-methyluridine-3'-phosphate
  modified_base 14: mod_base = OTHER; note = 2'-deoxy-2'-fluoroguanosine-3'-phosphate
  modified_base 15: mod_base = OTHER; note = 2'-O-methylcytidine-3'-phosphate
  modified_base 16: mod_base = OTHER; note = 2'-deoxy-2'-fluorouridine-3'-phosphate
  modified_base 17: mod_base = OTHER; note = 2'-O-methylguanosine-3'-phosphate
  modified_base 18: mod_base = OTHER; note = 2'-O-methyladenosine-3'-phosphate
  modified_base 19: mod_base = OTHER; note = 2'-O-methyluridine-3'-phosphate
  modified_base 20: mod_base = OTHER; note = 2'-O-methylguanosine-3'-phosphate
  modified_base 21: mod_base = OTHER; note = 2'-O-methylguanosine-3'-phosphorothioate
  modified_base 22: mod_base = OTHER; note = 2'-O-methyladenosine-3'-phosphorothioate
  modified_base 23: mod_base = OTHER; note = 2'-O-methyladenosine
  misc_feature 1..4: note = RNA
  misc_feature 6..23: note = RNA
  misc_feature 5: note = DNA
tacttcaatcactgctgatggaa

SEQ ID NO: 363 - DNA, 23 bp, synthetic construct
  source 1..23: mol_type = other DNA
  modified_base 1: mod_base = OTHER; note = 2'-O-methyluridine-3'-phosphorothioate 5'-(E)-Vinylphosphonate
  modified_base 2: mod_base = OTHER; note = 2'-deoxy-2'-fluoroadenosine-3'-phosphorothioate
  modified_base 3: mod_base = OTHER; note = 2'-O-methyluridine-3'-phosphate
  modified_base 4: mod_base = OTHER; note = 2'-O-methyladenosine-3'-phosphate
  modified_base 6: mod_base = OTHER; note = 2'-O-methyluridine-3'-phosphate
  modified_base 7: mod_base = OTHER; note = Thymidine-glycol nucleic acid (GNA), S-Isomer
  modified_base 8: mod_base = OTHER; note = 2'-O-methylcytidine-3'-phosphate
  modified_base 9: mod_base = OTHER; note = 2'-O-methyladenosine-3'-phosphate
  modified_base 10: mod_base = OTHER; note = 2'-O-methyladenosine-3'-phosphate
  modified_base 11: mod_base = OTHER; note = 2'-O-methyluridine-3'-phosphate
  modified_base 12: mod_base = OTHER; note = 2'-O-methylcytidine-3'-phosphate
  modified_base 13: mod_base = OTHER; note = 2'-O-methyladenosine-3'-phosphate
  modified_base 14: mod_base = OTHER; note = 2'-deoxy-2'-fluorocytidine-3'-phosphate
  modified_base 15: mod_base = OTHER; note = 2'-O-methyluridine-3'-phosphate
  modified_base 16: mod_base = OTHER; note = 2'-deoxy-2'-fluoroguanosine-3'-phosphate
  modified_base 17: mod_base = OTHER; note = 2'-O-methylcytidine-3'-phosphate
  modified_base 18: mod_base = OTHER; note = 2'-O-methyluridine-3'-phosphate
  modified_base 19: mod_base = OTHER; note = 2'-O-methylguanosine-3'-phosphate
  modified_base 20: mod_base = OTHER; note = 2'-O-methyladenosine-3'-phosphate
  modified_base 21: mod_base = OTHER; note = 2'-O-methyluridine-3'-phosphorothioate
  modified_base 22: mod_base = OTHER; note = 2'-O-methylguanosine-3'-phosphorothioate
  modified_base 23: mod_base = OTHER; note = 2'-O-methylguanosine
  misc_feature 1..4: note = RNA
  misc_feature 6..23: note = RNA
  misc_feature 5: note = DNA
tatacttcaatcactgctgatgg

SEQ ID NO: 364 - DNA, 23 bp, synthetic construct
  source 1..23: mol_type = other DNA
  modified_base 1: mod_base = OTHER; note = 2'-O-methyluridine-3'-phosphorothioate 5'-(E)-Vinylphosphonate
  modified_base 2: mod_base = OTHER; note = 2'-deoxy-2'-fluoroadenosine-3'-phosphorothioate
  modified_base 3: mod_base = OTHER; note = 2'-O-methylcytidine-3'-phosphate
  modified_base 4: mod_base = OTHER; note = 2'-O-methyladenosine-3'-phosphate
  modified_base 6: mod_base = OTHER; note = 2'-O-methyladenosine-3'-phosphate
  modified_base 7: mod_base = OTHER; note = Thymidine-glycol nucleic acid (GNA), S-Isomer
  modified_base 8: mod_base = OTHER; note = 2'-O-methyladenosine-3'-phosphate
  modified_base 9: mod_base = OTHER; note = 2'-O-methylcytidine-3'-phosphate
  modified_base 10: mod_base = OTHER; note = 2'-O-methyluridine-3'-phosphate
  modified_base 11: mod_base = OTHER; note = 2'-O-methyluridine-3'-phosphate
  modified_base 12: mod_base = OTHER; note = 2'-O-methylcytidine-3'-phosphate
  modified_base 13: mod_base = OTHER; note = 2'-O-methyladenosine-3'-phosphate
  modified_base 14: mod_base = OTHER; note = 2'-deoxy-2'-fluoroadenosine-3'-phosphate
  modified_base 15: mod_base = OTHER; note = 2'-O-methyluridine-3'-phosphate
  modified_base 16: mod_base = OTHER; note = 2'-deoxy-2'-fluorocytidine-3'-phosphate
  modified_base 17: mod_base = OTHER; note = 2'-O-methyladenosine-3'-phosphate
  modified_base 18: mod_base = OTHER; note = 2'-O-methylcytidine-3'-phosphate
  modified_base 19: mod_base = OTHER; note = 2'-O-methyluridine-3'-phosphate
  modified_base 20: mod_base = OTHER; note = 2'-O-methylguanosine-3'-phosphate
  modified_base 21: mod_base = OTHER; note = 2'-O-methylcytidine-3'-phosphorothioate
  modified_base 22: mod_base = OTHER; note = 2'-O-methyluridine-3'-phosphorothioate
  modified_base 23: mod_base = OTHER; note = 2'-O-methylguanosine
  misc_feature 1..4: note = RNA
  misc_feature 6..23: note = RNA
  misc_feature 5: note = DNA
tacagatacttcaatcactgctg

SEQ ID NO: 365 - DNA, 23 bp, synthetic construct
  source 1..23: mol_type = other DNA
  modified_base 1: mod_base = OTHER; note = 2'-O-methyluridine-3'-phosphorothioate 5'-(E)-Vinylphosphonate
  modified_base 2: mod_base = OTHER; note = 2'-deoxy-2'-fluoroguanosine-3'-phosphorothioate
  modified_base 3: mod_base = OTHER; note = 2'-O-methyladenosine-3'-phosphate
  modified_base 4: mod_base = OTHER; note = 2'-O-methyluridine-3'-phosphate
  modified_base 6: mod_base = OTHER; note = 2'-O-methyluridine-3'-phosphate
  modified_base 7: mod_base = OTHER; note = Adenosine-glycol nucleic acid (GNA), S-isomer
  modified_base 8: mod_base = OTHER; note = 2'-O-methylguanosine-3'-phosphate
  modified_base 9: mod_base = OTHER; note = 2'-O-methyladenosine-3'-phosphate
  modified_base 10: mod_base = OTHER; note = 2'-O-methyladenosine-3'-phosphate
  modified_base 11: mod_base = OTHER; note = 2'-O-methyladenosine-3'-phosphate
  modified_base 12: mod_base = OTHER; note = 2'-O-methyluridine-3'-phosphate
  modified_base 13: mod_base = OTHER; note = 2'-O-methyladenosine-3'-phosphate
  modified_base 14: mod_base = OTHER; note = 2'-deoxy-2'-fluoroadenosine-3'-phosphate
  modified_base 15: mod_base = OTHER; note = 2'-O-methylguanosine-3'-phosphate
  modified_base 16: mod_base = OTHER; note = 2'-deoxy-2'-fluorouridine-3'-phosphate
  modified_base 17: mod_base = OTHER; note = 2'-O-methylguanosine-3'-phosphate
  modified_base 18: mod_base = OTHER; note = 2'-O-methylguanosine-3'-phosphate
  modified_base 19: mod_base = OTHER; note = 2'-O-methyluridine-3'-phosphate
  modified_base 20: mod_base = OTHER; note = 2'-O-methyladenosine-3'-phosphate
  modified_base 21: mod_base = OTHER; note = 2'-O-methylguanosine-3'-phosphorothioate
  modified_base 22: mod_base = OTHER; note = 2'-O-methyluridine-3'-phosphorothioate
  modified_base 23: mod_base = OTHER; note = 2'-O-methylcytidine
  misc_feature 1..4: note = RNA
  misc_feature 6..23: note = RNA
  misc_feature 5: note = DNA
tgatttagaaataagtggtagtc

SEQ ID NO: 366 - DNA, 23 bp, synthetic construct
  source 1..23: mol_type = other DNA
  modified_base 1: mod_base = OTHER; note = 2'-O-methyluridine-3'-phosphorothioate 5'-(E)-Vinylphosphonate
  modified_base 2: mod_base = OTHER; note = 2'-deoxy-2'-fluorouridine-3'-phosphorothioate
  modified_base 3: mod_base = OTHER; note = 2'-O-methylguanosine-3'-phosphate
  modified_base 4: mod_base = OTHER; note = 2'-O-methylguanosine-3'-phosphate
  modified_base 6: mod_base = OTHER; note = 2'-O-methyladenosine-3'-phosphate
  modified_base 7: mod_base = OTHER; note = cytidine-2'-phosphate
  modified_base 8: mod_base = OTHER; note = 2'-O-methyluridine-3'-phosphate
  modified_base 9: mod_base = OTHER; note = 2'-O-methylguanosine-3'-phosphate
  modified_base 10: mod_base = OTHER; note = 2'-O-methyladenosine-3'-phosphate
  modified_base 11: mod_base = OTHER; note = 2'-O-methylguanosine-3'-phosphate
  modified_base 12: mod_base = OTHER; note = 2'-O-methylcytidine-3'-phosphate
  modified_base 13: mod_base = OTHER; note = 2'-O-methyladenosine-3'-phosphate
  modified_base 14: mod_base = OTHER; note = 2'-deoxy-2'-fluorocytidine-3'-phosphate
  modified_base 15: mod_base = OTHER; note = 2'-O-methyluridine-3'-phosphate
  modified_base 16: mod_base = OTHER; note = 2'-deoxy-2'-fluorouridine-3'-phosphate
  modified_base 17: mod_base = OTHER; note = 2'-O-methylguanosine-3'-phosphate
  modified_base 18: mod_base = OTHER; note = 2'-O-methyluridine-3'-phosphate
  modified_base 19: mod_base = OTHER; note = 2'-O-methyladenosine-3'-phosphate
  modified_base 20: mod_base = OTHER; note = 2'-O-methylcytidine-3'-phosphate
  modified_base 21: mod_base = OTHER; note = 2'-O-methyladenosine-3'-phosphorothioate
  modified_base 22: mod_base = OTHER; note = 2'-O-methylguanosine-3'-phosphorothioate
  modified_base 23: mod_base = OTHER; note = 2'-O-methylguanosine
  misc_feature 1..4: note = RNA
  misc_feature 6..23: note = RNA
  misc_feature 5: note = DNA
ttggaactgagcacttgtacagg

SEQ ID NO: 367 - DNA, 23 bp, synthetic construct
  source 1..23: mol_type = other DNA
  modified_base 1: mod_base = OTHER; note = 2'-O-methyluridine-3'-phosphorothioate 5'-(E)-Vinylphosphonate
  modified_base 2: mod_base = OTHER; note = 2'-deoxycytidine-3'-phosphorothioate
  modified_base 3: mod_base = OTHER; note = 2'-O-methyladenosine-3'-phosphate
  modified_base 4: mod_base = OTHER; note = 2'-O-methyladenosine-3'-phosphate
  modified_base 6: mod_base = OTHER; note = 2'-O-methyladenosine-3'-phosphate
  modified_base 8: mod_base = OTHER; note = 2'-O-methyladenosine-3'-phosphate
  modified_base 9: mod_base = OTHER; note = 2'-O-methylcytidine-3'-phosphate
  modified_base 10: mod_base = OTHER; note = 2'-O-methyluridine-3'-phosphate
  modified_base 11: mod_base = OTHER; note = 2'-O-methylguanosine-3'-phosphate
  modified_base 13: mod_base = OTHER; note = 2'-O-methylguanosine-3'-phosphate
  modified_base 14: mod_base = OTHER; note = 2'-deoxy-2'-fluoroadenosine-3'-phosphate
  modified_base 15: mod_base = OTHER; note = 2'-O-methylguanosine-3'-phosphate
  modified_base 16: mod_base = OTHER; note = 2'-O-methylcytidine-3'-phosphate
  modified_base 17: mod_base = OTHER; note = 2'-O-methyladenosine-3'-phosphate
  modified_base 18: mod_base = OTHER; note = 2'-O-methyladenosine-3'-phosphate
  modified_base 19: mod_base = OTHER; note = 2'-O-methyladenosine-3'-phosphate
  modified_base 20: mod_base = OTHER; note = 2'-O-methylguanosine-3'-phosphate
  modified_base 21: mod_base = OTHER; note = 2'-O-methyladenosine-3'-phosphorothioate
  modified_base 22: mod_base = OTHER; note = 2'-O-methyluridine-3'-phosphorothioate
  modified_base 23: mod_base = OTHER; note = 2'-O-methyladenosine
  misc_feature 1: note = RNA
  misc_feature 3..4: note = RNA
  misc_feature 6: note = RNA
  misc_feature 8..11: note = RNA
  misc_feature 13..23: note = RNA
  misc_feature 2: note = DNA
  misc_feature 5: note = DNA
  misc_feature 7: note = DNA
  misc_feature 12: note = DNA
tcaagaaactgggagcaaagata

SEQ ID NO: 368 - RNA, 23 nt, synthetic construct
  source 1..23: mol_type = other RNA
  modified_base 1: mod_base = OTHER; note = 2'-O-methyluridine-3'-phosphorothioate 5'-(E)-Vinylphosphonate
  modified_base 2: mod_base = OTHER; note = 2'-deoxy-2'-fluoroguanosine-3'-phosphorothioate
  modified_base 3: mod_base = OTHER; note = 2'-O-methylcytidine-3'-phosphate
  modified_base 4: mod_base = OTHER; note = 2'-O-methylcytidine-3'-phosphate
  modified_base 5: mod_base = OTHER; note = 2'-O-methyluridine-3'-phosphate
  modified_base 6: mod_base = OTHER; note = 2'-deoxy-2'-fluorouridine-3'-phosphate
  modified_base 7: mod_base = OTHER; note = 2'-O-methyluridine-3'-phosphate
  modified_base 8: mod_base = OTHER; note = 2'-deoxy-2'-fluoroguanosine-3'-phosphate
  modified_base 9: mod_base = OTHER; note = 2'-deoxy-2'-fluoroadenosine-3'-phosphate
  modified_base 10: mod_base = OTHER; note = 2'-O-methyladenosine-3'-phosphate
  modified_base 11: mod_base = OTHER; note = 2'-O-methyladenosine-3'-phosphate
  modified_base 12: mod_base = OTHER; note = 2'-O-methylguanosine-3'-phosphate
  modified_base 13: mod_base = OTHER; note = 2'-O-methyluridine-3'-phosphate
  modified_base 14: mod_base = OTHER; note = 2'-deoxy-2'-fluorocytidine-3'-phosphate
  modified_base 15: mod_base = OTHER; note = 2'-O-methylcytidine-3'-phosphate
  modified_base 16: mod_base = OTHER; note = 2'-deoxy-2'-fluorouridine-3'-phosphate
  modified_base 17: mod_base = OTHER; note = 2'-O-methyluridine-3'-phosphate
  modified_base 18: mod_base = OTHER; note = 2'-O-methyluridine-3'-phosphate
  modified_base 19: mod_base = OTHER; note = 2'-O-methylcytidine-3'-phosphate
  modified_base 20: mod_base = OTHER; note = 2'-O-methyladenosine-3'-phosphate
  modified_base 21: mod_base = OTHER; note = 2'-O-methyluridine-3'-phosphorothioate
  modified_base 22: mod_base = OTHER; note = 2'-O-methylguanosine-3'-phosphorothioate
  modified_base 23: mod_base = OTHER; note = 2'-O-methyladenosine
tgcctttgaaagtcctttcatga

SEQ ID NO: 369 - RNA, 23 nt, synthetic construct
  source 1..23: mol_type = other RNA
  modified_base 1: mod_base = OTHER; note = 2'-O-methyluridine-3'-phosphorothioate 5'-(E)-Vinylphosphonate
  modified_base 2: mod_base = OTHER; note = 2'-deoxy-2'-fluoroadenosine-3'-phosphorothioate
  modified_base 3: mod_base = OTHER; note = 2'-O-methylcytidine-3'-phosphate
  modified_base 4: mod_base = OTHER; note = 2'-O-methyladenosine-3'-phosphate
  modified_base 5: mod_base = OTHER; note = 2'-O-methyluridine-3'-phosphate
  modified_base 6: mod_base = OTHER; note = 2'-deoxy-2'-fluoroadenosine-3'-phosphate
  modified_base 7: mod_base = OTHER; note = 2'-O-methylguanosine-3'-phosphate
  modified_base 8: mod_base = OTHER; note = 2'-deoxy-2'-fluoroadenosine-3'-phosphate
  modified_base 9: mod_base = OTHER; note = 2'-deoxy-2'-fluoroguanosine-3'-phosphate
  modified_base 10: mod_base = OTHER; note = 2'-O-methyladenosine-3'-phosphate
  modified_base 11: mod_base = OTHER; note = 2'-O-methyladenosine-3'-phosphate
  modified_base 12: mod_base = OTHER; note = 2'-O-methylcytidine-3'-phosphate
  modified_base 13: mod_base = OTHER; note = 2'-O-methyladenosine-3'-phosphate
  modified_base 14: mod_base = OTHER; note = 2'-deoxy-2'-fluorocytidine-3'-phosphate
  modified_base 15: mod_base = OTHER; note = 2'-O-methylcytidine-3'-phosphate
  modified_base 16: mod_base = OTHER; note = 2'-deoxy-2'-fluorocytidine-3'-phosphate
  modified_base 17: mod_base = OTHER; note = 2'-O-methyluridine-3'-phosphate
  modified_base 18: mod_base = OTHER; note = 2'-O-methylcytidine-3'-phosphate
  modified_base 19: mod_base = OTHER; note = 2'-O-methyluridine-3'-phosphate
  modified_base 20: mod_base = OTHER; note = 2'-O-methyluridine-3'-phosphate
  modified_base 21: mod_base = OTHER; note = 2'-O-methyluridine-3'-phosphorothioate
  modified_base 22: mod_base = OTHER; note = 2'-O-methyluridine-3'-phosphorothioate
  modified_base 23: mod_base = OTHER; note = 2'-O-methylguanosine
tacatagagaacaccctcttttg

SEQ ID NO: 370 - RNA, 23 nt, synthetic construct
  source 1..23: mol_type = other RNA
  modified_base 1: mod_base = OTHER; note = 2'-O-methyluridine-3'-phosphorothioate 5'-(E)-Vinylphosphonate
  modified_base 2: mod_base = OTHER; note = 2'-deoxy-2'-fluorouridine-3'-phosphorothioate
  modified_base 3: mod_base = OTHER; note = 2'-O-methyladenosine-3'-phosphate
  modified_base 4: mod_base = OTHER; note = 2'-O-methylcytidine-3'-phosphate
  modified_base 5: mod_base = OTHER; note = 2'-O-methyladenosine-3'-phosphate
  modified_base 6: mod_base = OTHER; note = 2'-deoxy-2'-fluorouridine-3'-phosphate
  modified_base 7: mod_base = OTHER; note = 2'-O-methyladenosine-3'-phosphate
  modified_base 8: mod_base = OTHER; note = 2'-deoxy-2'-fluoroguanosine-3'-phosphate
  modified_base 9: mod_base = OTHER; note = 2'-deoxy-2'-fluoroadenosine-3'-phosphate
  modified_base 10: mod_base = OTHER; note = 2'-O-methylguanosine-3'-phosphate
  modified_base 11: mod_base = OTHER; note = 2'-O-methyladenosine-3'-phosphate
  modified_base 12: mod_base = OTHER; note = 2'-O-methyladenosine-3'-phosphate
  modified_base 13: mod_base = OTHER; note = 2'-O-methylcytidine-3'-phosphate
  modified_base 14: mod_base = OTHER; note = 2'-deoxy-2'-fluoroadenosine-3'-phosphate
  modified_base 15: mod_base = OTHER; note = 2'-O-methylcytidine-3'-phosphate
  modified_base 16: mod_base = OTHER; note = 2'-deoxy-2'-fluorocytidine-3'-phosphate
  modified_base 17: mod_base = OTHER; note = 2'-O-methylcytidine-3'-phosphate
  modified_base 18: mod_base = OTHER; note = 2'-O-methyluridine-3'-phosphate
  modified_base 19: mod_base = OTHER; note = 2'-O-methylcytidine-3'-phosphate
  modified_base 20: mod_base = OTHER; note = 2'-O-methyluridine-3'-phosphate
  modified_base 21: mod_base = OTHER; note = 2'-O-methyluridine-3'-phosphorothioate
  modified_base 22: mod_base = OTHER; note = 2'-O-methyluridine-3'-phosphorothioate
  modified_base 23: mod_base = OTHER; note = 2'-O-methyluridine
ttacatagagaacaccctctttt

SEQ ID NO: 371 - RNA, 23 nt, synthetic construct
  source 1..23: mol_type = other RNA
  modified_base 1: mod_base = OTHER; note = 2'-O-methyluridine-3'-phosphorothioate 5'-(E)-Vinylphosphonate
  modified_base 2: mod_base = OTHER; note = 2'-deoxy-2'-fluorouridine-3'-phosphorothioate
  modified_base 3: mod_base = OTHER; note = 2'-O-methyluridine-3'-phosphate
  modified_base 4: mod_base = OTHER; note = 2'-O-methylcytidine-3'-phosphate
  modified_base 5: mod_base = OTHER; note = 2'-O-methylguanosine-3'-phosphate
  modified_base 6: mod_base = OTHER; note = 2'-deoxy-2'-fluorouridine-3'-phosphate
  modified_base 7: mod_base = OTHER; note = 2'-O-methyladenosine-3'-phosphate
  modified_base 8: mod_base = OTHER; note = 2'-deoxy-2'-fluoroguanosine-3'-phosphate
  modified_base 9: mod_base = OTHER; note = 2'-deoxy-2'-fluorouridine-3'-phosphate
  modified_base 10: mod_base = OTHER; note = 2'-O-methylcytidine-3'-phosphate
  modified_base 11: mod_base = OTHER; note = 2'-O-methyluridine-3'-phosphate
  modified_base 12: mod_base = OTHER; note = 2'-O-methyluridine-3'-phosphate
  modified_base 13: mod_base = OTHER; note = 2'-O-methylguanosine-3'-phosphate
  modified_base 14: mod_base = OTHER; note = 2'-deoxy-2'-fluoroadenosine-3'-phosphate
  modified_base 15: mod_base = OTHER; note = 2'-O-methyluridine-3'-phosphate
  modified_base 16: mod_base = OTHER; note = 2'-deoxy-2'-fluoroadenosine-3'-phosphate
  modified_base 17: mod_base = OTHER; note = 2'-O-methylcytidine-3'-phosphate
  modified_base 18: mod_base = OTHER; note = 2'-O-methylcytidine-3'-phosphate
  modified_base 19: mod_base = OTHER; note = 2'-O-methylcytidine-3'-phosphate
  modified_base 20: mod_base = OTHER; note = 2'-O-methyluridine-3'-phosphate
  modified_base 21: mod_base = OTHER; note = 2'-O-methyluridine-3'-phosphorothioate
  modified_base 22: mod_base = OTHER; note = 2'-O-methylcytidine-3'-phosphorothioate
  modified_base 23: mod_base = OTHER; note = 2'-O-methylcytidine
tttcgtagtcttgatacccttcc

SEQ ID NO: 372 - RNA, 23 nt, synthetic construct
  source 1..23: mol_type = other RNA
  modified_base 1: mod_base = OTHER; note = 2'-O-methyluridine-3'-phosphorothioate 5'-(E)-Vinylphosphonate
  modified_base 2: mod_base = OTHER; note = 2'-deoxy-2'-fluoroguanosine-3'-phosphorothioate
  modified_base 3: mod_base = OTHER; note = 2'-O-methyluridine-3'-phosphate
  modified_base 4: mod_base = OTHER; note = 2'-O-methyluridine-3'-phosphate
  modified_base 5: mod_base = OTHER; note = 2'-O-methylcytidine-3'-phosphate
  modified_base 6: mod_base = OTHER; note = 2'-deoxy-2'-fluoroguanosine-3'-phosphate
  modified_base 7: mod_base = OTHER; note = 2'-O-methyluridine-3'-phosphate
  modified_base 8: mod_base = OTHER; note = 2'-deoxy-2'-fluoroadenosine-3'-phosphate
  modified_base 9: mod_base = OTHER; note = 2'-deoxy-2'-fluoroguanosine-3'-phosphate
  modified_base 10: mod_base = OTHER; note = 2'-O-methyluridine-3'-phosphate
  modified_base 11: mod_base = OTHER; note = 2'-O-methylcytidine-3'-phosphate
  modified_base 12: mod_base = OTHER; note = 2'-O-methyluridine-3'-phosphate
  modified_base 13: mod_base = OTHER; note = 2'-O-methyluridine-3'-phosphate
  modified_base 14: mod_base = OTHER; note = 2'-deoxy-2'-fluoroguanosine-3'-phosphate
  modified_base 15: mod_base = OTHER; note = 2'-O-methyladenosine-3'-phosphate
  modified_base 16: mod_base = OTHER; note = 2'-deoxy-2'-fluorouridine-3'-phosphate
  modified_base 17: mod_base = OTHER; note = 2'-O-methyladenosine-3'-phosphate
  modified_base 18: mod_base = OTHER; note = 2'-O-methylcytidine-3'-phosphate
  modified_base 19: mod_base = OTHER; note = 2'-O-methylcytidine-3'-phosphate
  modified_base 20: mod_base = OTHER; note = 2'-O-methylcytidine-3'-phosphate
  modified_base 21: mod_base = OTHER; note = 2'-O-methyluridine-3'-phosphorothioate
  modified_base 22: mod_base = OTHER; note = 2'-O-methyluridine-3'-phosphorothioate
  modified_base 23: mod_base = OTHER; note = 2'-O-methylcytidine
tgttcgtagtcttgatacccttc

SEQ ID NO: 373 - RNA, 23 nt, synthetic construct
  source 1..23: mol_type = other RNA
  modified_base 1: mod_base = OTHER; note = 2'-O-methyluridine-3'-phosphorothioate 5'-(E)-Vinylphosphonate
  modified_base 2: mod_base = OTHER; note = 2'-deoxy-2'-fluorouridine-3'-phosphorothioate
  modified_base 3: mod_base = OTHER; note = 2'-O-methylcytidine-3'-phosphate
  modified_base 4: mod_base = OTHER; note = 2'-O-methyladenosine-3'-phosphate
  modified_base 5: mod_base = OTHER; note = 2'-O-methylguanosine-3'-phosphate
  modified_base 6: mod_base = OTHER; note = 2'-deoxy-2'-fluoroguanosine-3'-phosphate
  modified_base 7: mod_base = OTHER; note = 2'-O-methyluridine-3'-phosphate
  modified_base 8: mod_base = OTHER; note = 2'-deoxy-2'-fluorouridine-3'-phosphate
  modified_base 9: mod_base = OTHER; note = 2'-deoxy-2'-fluorocytidine-3'-phosphate
  modified_base 10: mod_base = OTHER; note = 2'-O-methylguanosine-3'-phosphate
  modified_base 11: mod_base = OTHER; note = 2'-O-methyluridine-3'-phosphate
  modified_base 12: mod_base = OTHER; note = 2'-O-methyladenosine-3'-phosphate
  modified_base 13: mod_base = OTHER; note = 2'-O-methylguanosine-3'-phosphate
  modified_base 14: mod_base = OTHER; note = 2'-deoxy-2'-fluorouridine-3'-phosphate
  modified_base 15: mod_base = OTHER; note = 2'-O-methylcytidine-3'-phosphate
  modified_base 16: mod_base = OTHER; note = 2'-deoxy-2'-fluorouridine-3'-phosphate
  modified_base 17: mod_base = OTHER; note = 2'-O-methyluridine-3'-phosphate
  modified_base 18: mod_base = OTHER; note = 2'-O-methylguanosine-3'-phosphate
  modified_base 19: mod_base = OTHER; note = 2'-O-methyladenosine-3'-phosphate
  modified_base 20: mod_base = OTHER; note = 2'-O-methyluridine-3'-phosphate
  modified_base 21: mod_base = OTHER; note = 2'-O-methyladenosine-3'-phosphorothioate
  modified_base 22: mod_base = OTHER; note = 2'-O-methylcytidine-3'-phosphorothioate
  modified_base 23: mod_base = OTHER; note = 2'-O-methylcytidine
ttcaggttcgtagtcttgatacc

SEQ ID NO: 374 - RNA, 23 nt, synthetic construct
  source 1..23: mol_type = other RNA
  modified_base 1: mod_base = OTHER; note = 2'-O-methyluridine-3'-phosphorothioate 5'-(E)-Vinylphosphonate
  modified_base 2: mod_base = OTHER; note = 2'-deoxy-2'-fluorocytidine-3'-phosphorothioate
  modified_base 3: mod_base = OTHER; note = 2'-O-methyluridine-3'-phosphate
  modified_base 4: mod_base = OTHER; note = 2'-O-methyluridine-3'-phosphate
  modified_base 5: mod_base = OTHER; note = 2'-O-methylcytidine-3'-phosphate
  modified_base 6: mod_base = OTHER; note = 2'-deoxy-2'-fluoroadenosine-3'-phosphate
  modified_base 7: mod_base = OTHER; note = 2'-O-methylguanosine-3'-phosphate
  modified_base 8: mod_base = OTHER; note = 2'-deoxy-2'-fluoroguanosine-3'-phosphate
  modified_base 9: mod_base = OTHER; note = 2'-deoxy-2'-fluorouridine-3'-phosphate
  modified_base 10: mod_base = OTHER; note = 2'-O-methyluridine-3'-phosphate
  modified_base 11: mod_base = OTHER; note = 2'-O-methylcytidine-3'-phosphate
  modified_base 12: mod_base = OTHER; note = 2'-O-methylguanosine-3'-phosphate
  modified_base 13: mod_base = OTHER; note = 2'-O-methyluridine-3'-phosphate
  modified_base 14: mod_base = OTHER; note = 2'-deoxy-2'-fluoroadenosine-3'-phosphate
  modified_base 15: mod_base = OTHER; note = 2'-O-methylguanosine-3'-phosphate
  modified_base 16: mod_base = OTHER; note = 2'-deoxy-2'-fluorouridine-3'-phosphate
  modified_base 17: mod_base = OTHER; note = 2'-O-methylcytidine-3'-phosphate
  modified_base 18: mod_base = OTHER; note = 2'-O-methyluridine-3'-phosphate
  modified_base 19: mod_base = OTHER; note = 2'-O-methyluridine-3'-phosphate
  modified_base 20: mod_base = OTHER; note = 2'-O-methylguanosine-3'-phosphate
  modified_base 21: mod_base = OTHER; note = 2'-O-methyladenosine-3'-phosphorothioate
  modified_base 22: mod_base = OTHER; note = 2'-O-methyluridine-3'-phosphorothioate
  modified_base 23: mod_base = OTHER; note = 2'-O-methyladenosine
tcttcaggttcgtagtcttgata

SEQ ID NO: 375 - RNA, 23 nt, synthetic construct
  source 1..23: mol_type = other RNA
  modified_base 1: mod_base = OTHER; note = 2'-O-methyluridine-3'-phosphorothioate 5'-(E)-Vinylphosphonate
  modified_base 2: mod_base = OTHER; note = 2'-deoxy-2'-fluorouridine-3'-phosphorothioate
  modified_base 3: mod_base = OTHER; note = 2'-O-methylcytidine-3'-phosphate
  modified_base 4: mod_base = OTHER; note = 2'-O-methyladenosine-3'-phosphate
  modified_base 5: mod_base = OTHER; note = 2'-O-methylguanosine-3'-phosphate
  modified_base 6: mod_base = OTHER; note = 2'-deoxy-2'-fluorocytidine-3'-phosphate
  modified_base 7: mod_base = OTHER; note = 2'-O-methyladenosine-3'-phosphate
  modified_base 8: mod_base = OTHER; note = 2'-deoxy-2'-fluoroguanosine-3'-phosphate
  modified_base 9: mod_base = OTHER; note = 2'-deoxy-2'-fluoroadenosine-3'-phosphate
  modified_base 10: mod_base = OTHER; note = 2'-O-methyluridine-3'-phosphate
  modified_base 11: mod_base = OTHER; note = 2'-O-methylcytidine-3'-phosphate
  modified_base 12: mod_base = OTHER; note = 2'-O-methyluridine-3'-phosphate
  modified_base 13: mod_base = OTHER; note = 2'-O-methylcytidine-3'-phosphate
  modified_base 14: mod_base = OTHER; note = 2'-deoxy-2'-fluoroadenosine-3'-phosphate
  modified_base 15: mod_base = OTHER; note = 2'-O-methyladenosine-3'-phosphate
  modified_base 16: mod_base = OTHER; note = 2'-deoxy-2'-fluoroguanosine-3'-phosphate
  modified_base 17: mod_base = OTHER; note = 2'-O-methyladenosine-3'-phosphate
  modified_base 18: mod_base = OTHER; note = 2'-O-methyladenosine-3'-phosphate
  modified_base 19: mod_base = OTHER; note = 2'-O-methyladenosine-3'-phosphate
  modified_base 20: mod_base = OTHER; note = 2'-O-methylcytidine-3'-phosphate
  modified_base 21: mod_base = OTHER; note = 2'-O-methyluridine-3'-phosphorothioate
  modified_base 22: mod_base = OTHER; note = 2'-O-methylguanosine-3'-phosphorothioate
  modified_base 23: mod_base = OTHER; note = 2'-O-methylguanosine
ttcagcagatctcaagaaactgg

SEQ ID NO: 376 - RNA, 23 nt, synthetic construct
  source 1..23: mol_type = other RNA
  modified_base 1: mod_base = OTHER; note = 2'-O-methyluridine-3'-phosphorothioate 5'-(E)-Vinylphosphonate
  modified_base 2: mod_base = OTHER; note = 2'-deoxy-2'-fluorouridine-3'-phosphorothioate
  modified_base 3: mod_base = OTHER; note = 2'-O-methyluridine-3'-phosphate
  modified_base 4: mod_base = OTHER; note = 2'-O-methylguanosine-3'-phosphate
  modified_base 5: mod_base = OTHER; note = 2'-O-methyladenosine-3'-phosphate
  modified_base 6: mod_base = OTHER; note = 2'-deoxy-2'-fluoroguanosine-3'-phosphate
  modified_base 7: mod_base = OTHER; note = 2'-O-methyladenosine-3'-phosphate
  modified_base 8: mod_base = OTHER; note = 2'-deoxy-2'-fluoroadenosine-3'-phosphate
  modified_base 9: mod_base = OTHER; note = 2'-deoxy-2'-fluoroadenosine-3'-phosphate
  modified_base 10: mod_base = OTHER; note = 2'-O-methyluridine-3'-phosphate
  modified_base 11: mod_base = OTHER; note = 2'-O-methylguanosine-3'-phosphate
  modified_base 12: mod_base = OTHER; note = 2'-O-methyluridine-3'-phosphate
  modified_base 13: mod_base = OTHER; note = 2'-O-methylcytidine-3'-phosphate
  modified_base 14: mod_base = OTHER; note = 2'-deoxy-2'-fluoroadenosine-3'-phosphate
  modified_base 15: mod_base = OTHER; note = 2'-O-methyluridine-3'-phosphate
  modified_base 16: mod_base = OTHER; note = 2'-deoxy-2'-fluoroguanosine-3'-phosphate
  modified_base 17: mod_base = OTHER; note = 2'-O-methyladenosine-3'-phosphate
  modified_base 18: mod_base = OTHER; note = 2'-O-methylcytidine-3'-phosphate
  modified_base 19: mod_base = OTHER; note = 2'-O-methyluridine-3'-phosphate
  modified_base 20: mod_base = OTHER; note = 2'-O-methylguanosine-3'-phosphate
  modified_base 21: mod_base = OTHER; note = 2'-O-methylguanosine-3'-phosphorothioate
  modified_base 22: mod_base = OTHER; note = 2'-O-methylguanosine-3'-phosphorothioate
  modified_base 23: mod_base = OTHER; note = 2'-O-methylcytidine
tttgagaaatgtcatgactgggc

SEQ ID NO: 377 - RNA, 23 nt, synthetic construct
  source 1..23: mol_type = other RNA
  modified_base 1: mod_base = OTHER; note = 2'-O-methyluridine-3'-phosphorothioate 5'-(E)-Vinylphosphonate
  modified_base 2: mod_base = OTHER; note = 2'-deoxy-2'-fluoroadenosine-3'-phosphorothioate
  modified_base 3: mod_base = OTHER; note = 2'-O-methyluridine-3'-phosphate
  modified_base 4: mod_base = OTHER; note = 2'-O-methylguanosine-3'-phosphate
  modified_base 5: mod_base = OTHER; note = 2'-O-methyluridine-3'-phosphate
  modified_base 6: mod_base = OTHER; note = 2'-deoxy-2'-fluoroadenosine-3'-phosphate
  modified_base 7: mod_base = OTHER; note = 2'-O-methyluridine-3'-phosphate
  modified_base 8: mod_base = OTHER; note = 2'-deoxy-2'-fluorouridine-3'-phosphate
  modified_base 9: mod_base = OTHER; note = 2'-deoxy-2'-fluorocytidine-3'-phosphate
  modified_base 10: mod_base = OTHER; note = 2'-O-methyladenosine-3'-phosphate
  modified_base 11: mod_base = OTHER; note = 2'-O-methylcytidine-3'-phosphate
  modified_base 12: mod_base = OTHER; note = 2'-O-methyluridine-3'-phosphate
  modified_base 13: mod_base = OTHER; note = 2'-O-methyluridine-3'-phosphate
  modified_base 14: mod_base = OTHER; note = 2'-deoxy-2'-fluorocytidine-3'-phosphate
  modified_base 15: mod_base = OTHER; note = 2'-O-methyladenosine-3'-phosphate
  modified_base 16: mod_base = OTHER; note = 2'-deoxy-2'-fluoroguanosine-3'-phosphate
  modified_base 17: mod_base = OTHER; note = 2'-O-methyluridine-3'-phosphate
  modified_base 18: mod_base = OTHER; note = 2'-O-methylguanosine-3'-phosphate
  modified_base 19: mod_base = OTHER; note = 2'-O-methyladenosine-3'-phosphate
  modified_base 20: mod_base = OTHER; note = 2'-O-methyladenosine-3'-phosphate
  modified_base 21: mod_base = OTHER; note = 2'-O-methyladenosine-3'-phosphorothioate
  modified_base 22: mod_base = OTHER; note = 2'-O-methylguanosine-3'-phosphorothioate
  modified_base 23: mod_base = OTHER; note = 2'-O-methylguanosine
tatgtattcacttcagtgaaagg

SEQ ID NO: 378 - RNA, 23 nt, synthetic construct
  source 1..23: mol_type = other RNA
  modified_base 1: mod_base = OTHER; note = 2'-O-methyluridine-3'-phosphorothioate 5'-(E)-Vinylphosphonate
  modified_base 2: mod_base = OTHER; note = 2'-deoxy-2'-fluorocytidine-3'-phosphorothioate
  modified_base 3: mod_base = OTHER; note = 2'-O-methyladenosine-3'-phosphate
  modified_base 4: mod_base = OTHER; note = 2'-O-methyluridine-3'-phosphate
  modified_base 5: mod_base = OTHER; note = 2'-O-methylguanosine-3'-phosphate
  modified_base 6: mod_base = OTHER; note = 2'-deoxy-2'-fluorouridine-3'-phosphate
  modified_base 7: mod_base = OTHER; note = 2'-O-methyladenosine-3'-phosphate
  modified_base 8: mod_base = OTHER; note = 2'-deoxy-2'-fluorouridine-3'-phosphate
  modified_base 9: mod_base = OTHER; note = 2'-deoxy-2'-fluorouridine-3'-phosphate
  modified_base 10: mod_base = OTHER; note = 2'-O-methylcytidine-3'-phosphate
  modified_base 11: mod_base = OTHER; note = 2'-O-methyladenosine-3'-phosphate
  modified_base 12: mod_base = OTHER; note = 2'-O-methylcytidine-3'-phosphate
  modified_base 13: mod_base = OTHER; note = 2'-O-methyluridine-3'-phosphate
  modified_base 14: mod_base = OTHER; note = 2'-deoxy-2'-fluorouridine-3'-phosphate
  modified_base 15: mod_base = OTHER; note = 2'-O-methylcytidine-3'-phosphate
  modified_base 16: mod_base = OTHER; note = 2'-deoxy-2'-fluoroadenosine-3'-phosphate
  modified_base 17: mod_base = OTHER; note = 2'-O-methylguanosine-3'-phosphate
  modified_base 18: mod_base = OTHER; note = 2'-O-methyluridine-3'-phosphate
  modified_base 19: mod_base = OTHER; note = 2'-O-methylguanosine-3'-phosphate
  modified_base 20: mod_base = OTHER; note = 2'-O-methyladenosine-3'-phosphate
  modified_base 21: mod_base = OTHER; note = 2'-O-methyladenosine-3'-phosphorothioate
  modified_base 22: mod_base = OTHER; note = 2'-O-methyladenosine-3'-phosphorothioate
  modified_base 23: mod_base = OTHER; note = 2'-O-methylguanosine
tcatgtattcacttcagtgaaag

SEQ ID NO: 379 - RNA, 23 nt, synthetic construct
  source 1..23: mol_type = other RNA
  modified_base 1: mod_base = OTHER; note = 2'-O-methyluridine-3'-phosphorothioate 5'-(E)-Vinylphosphonate
  modified_base 2: mod_base = OTHER; note = 2'-deoxy-2'-fluorouridine-3'-phosphorothioate
  modified_base 3: mod_base = OTHER; note = 2'-O-methyladenosine-3'-phosphate
  modified_base 4: mod_base = OTHER; note = 2'-O-methylcytidine-3'-phosphate
  modified_base 5: mod_base = OTHER; note = 2'-O-methylcytidine-3'-phosphate
  modified_base 6: mod_base = OTHER; note = 2'-deoxy-2'-fluoroadenosine-3'-phosphate
  modified_base 7: mod_base = OTHER; note = 2'-O-methyluridine-3'-phosphate
  modified_base 8: mod_base = OTHER; note = 2'-deoxy-2'-fluoroguanosine-3'-phosphate
  modified_base 9: mod_base = OTHER; note = 2'-deoxy-2'-fluorouridine-3'-phosphate
  modified_base 10: mod_base = OTHER; note = 2'-O-methyladenosine-3'-phosphate
  modified_base 11: mod_base = OTHER; note = 2'-O-methyluridine-3'-phosphate
  modified_base 12: mod_base = OTHER; note = 2'-O-methyluridine-3'-phosphate
  modified_base 13: mod_base = OTHER; note = 2'-O-methylcytidine-3'-phosphate
  modified_base 14: mod_base = OTHER; note = 2'-deoxy-2'-fluoroadenosine-3'-phosphate
  modified_base 15: mod_base = OTHER; note = 2'-O-methylcytidine-3'-phosphate
  modified_base 16: mod_base = OTHER; note = 2'-deoxy-2'-fluorouridine-3'-phosphate
  modified_base 17: mod_base = OTHER; note = 2'-O-methyluridine-3'-phosphate
  modified_base 18: mod_base = OTHER; note = 2'-O-methylcytidine-3'-phosphate
  modified_base 19: mod_base = OTHER; note = 2'-O-methyladenosine-3'-phosphate
  modified_base 20: mod_base = OTHER; note = 2'-O-methylguanosine-3'-phosphate
  modified_base 21: mod_base = OTHER; note = 2'-O-methyluridine-3'-phosphorothioate
  modified_base 22: mod_base = OTHER; note = 2'-O-methylguanosine-3'-phosphorothioate
  modified_base 23: mod_base = OTHER; note = 2'-O-methyladenosine
ttaccatgtattcacttcagtga

1. A double stranded ribonucleic acid (dsRNA) agent, or a pharmaceutically acceptable salt thereof, comprising a sense strand and an antisense strand forming a double stranded region, wherein the nucleotide sequence of the antisense strand differs by no more than 4 modified or unmodified nucleotides from the nucleotide sequence 5′-VPusdCscadAcdAuuugdTcAfcuugcucsusu-3′ of SEQ ID NO:64,
wherein a, g, c and u are 2-O-methyl (2-OMe) A, G, C and U; Af, Gf, and Cf are 2-fluoro (2-F) A, G, and C; dA, dT, and dC are 2-deoxy A, T, and C; (Ahd) is 2′-O-hexadecyl adenosine-3′-phosphate; VP is Vinyl-phosphonate; and s is a phosphorothioate linkage.

2. The dsRNA agent, or a pharmaceutically acceptable salt thereof, of claim 1, wherein the nucleotide sequence of the sense strand differs by no more than 4 modified or unmodified nucleotides from the nucleotide sequence 5′-gsasgca(Ahd)guGfAfCfaaauguugsgsa-3′ of SEQ ID NO:21.

3. The dsRNA agent, or a pharmaceutically acceptable salt thereof, of claim 1, wherein the nucleotide sequence of the antisense strand differs by no more than 3 modified or unmodified nucleotides from the nucleotide sequence 5′-VPusdCscadAcdAuuugdTcAfcuugcucsusu-3′ of SEQ ID NO:64.

4. The dsRNA agent, or a pharmaceutically acceptable salt thereof, of claim 3, wherein the nucleotide sequence of the sense strand differs by no more than 3 modified or unmodified nucleotides from the nucleotide sequence 5′-gsasgca(Ahd)guGfAfCfaaauguugsgsa-3′ of SEQ ID NO:21.

5. The dsRNA agent, or a pharmaceutically acceptable salt thereof, of claim 1, wherein the nucleotide sequence of the antisense strand differs by no more than 2 modified or unmodified nucleotides from the nucleotide sequence 5′-VPusdCscadAcdAuuugdTcAfcuugcucsusu-3′ of SEQ ID NO:64.

6. The dsRNA agent, or a pharmaceutically acceptable salt thereof, of claim 5, wherein the nucleotide sequence of the sense strand differs by no more than 2 modified or unmodified nucleotides from the nucleotide sequence 5′-gsasgca(Ahd)guGfAfCfaaauguugsgsa-3′ of SEQ ID NO:21.

7. The dsRNA agent, or a pharmaceutically acceptable salt thereof, of claim 1, wherein the nucleotide sequence of the antisense strand differs by no more than 1 modified or unmodified nucleotides from the nucleotide sequence 5′-VPusdCscadAcdAuuugdTcAfcuugcucsusu-3′ of SEQ ID NO:64.

8. The dsRNA agent, or a pharmaceutically acceptable salt thereof, of claim 7, wherein the nucleotide sequence of the sense strand differs by no more than 1 modified or unmodified nucleotides from the nucleotide sequence 5′-gsasgca(Ahd)guGfAfCfaaauguugsgsa-3′ of SEQ ID NO:21.

9. The dsRNA agent, or a pharmaceutically acceptable salt thereof, of claim 1, wherein the antisense strand comprises the nucleotide sequence 5′-VPusdCscadAcdAuuugdTcAfcuugcucsusu-3′ of SEQ ID NO:64.

10. The dsRNA agent, or a pharmaceutically acceptable salt thereof, of claim 9, wherein the sense strand comprises the nucleotide sequence 5′-gsasgca(Ahd)guGfAfCfaaauguugsgsa-3′ of SEQ ID NO:21.

11. The dsRNA agent, or a pharmaceutically acceptable salt thereof, of claim 1, wherein the antisense strand consists of the nucleotide sequence 5′-VPusdCscadAcdAuuugdTcAfcuugcucsusu-3′ of SEQ ID NO:64.

12. The dsRNA agent, or a pharmaceutically acceptable salt thereof, of claim 11, the sense strand consists of the nucleotide sequence 5′-gsasgca(Ahd)guGfAfCfaaauguugsgsa-3′ of SEQ ID NO:21.

13. A method for inhibiting expression of a gene encoding α-Synuclein (SNCA) in a cell, comprising contacting the cell with the dsRNA agent, or a pharmaceutically acceptable salt thereof, of claim 1.

14. A method for inhibiting expression of a gene encoding α-Synuclein (SNCA) in a cell, comprising contacting the cell with the dsRNA agent, or a pharmaceutically acceptable salt thereof, of claim 12.

15. A pharmaceutical composition for inhibiting expression of a gene encoding α-Synuclein (SNCA), comprising the dsRNA agent, or a pharmaceutically acceptable salt thereof, of claim 1, and a pharmaceutically acceptable excipient or carrier.

16. A pharmaceutical composition for inhibiting expression of a gene encoding α-Synuclein (SNCA) comprising the dsRNA agent, or a pharmaceutically acceptable salt thereof, of claim 12, and a pharmaceutically acceptable excipient or carrier.

17. A method for inhibiting expression of a gene encoding α-Synuclein (SNCA) in a subject, comprising administering to the subject a therapeutically effective amount of the pharmaceutical composition of claim 15.

18. The method of claim 17, wherein the subject has been diagnosed with Parkinson's disease.

19. The method of claim 17, wherein the pharmaceutical composition is administered intrathecally.

20. A method for inhibiting expression of a gene encoding α-Synuclein (SNCA) in a subject, comprising administering to the subject a therapeutically effective amount of the pharmaceutical composition of claim 16.

21. The method of claim 20, wherein the subject has been diagnosed with Parkinson's disease.

22. The method of claim 20, wherein the pharmaceutical composition is administered intrathecally.

23. A sodium salt of a double stranded ribonucleic acid (dsRNA) agent comprising a sense strand and an antisense strand forming a double stranded region, wherein the sense strand consists of the nucleotide sequence 5′-gsasgca(Ahd)guGfAfCfaaauguugsgsa-3′ of SEQ ID NO:21 and the antisense strand consists of the nucleotide sequence 5′-VPusdCscadAcdAuuugdTcAfcuugcucsusu-3′ of SEQ ID NO:64, wherein a, g, c and u are 2-O-methyl (2-OMe) A, G, C and U; Af, Gf, and Cf are 2-fluoro (2-F) A, G, and C; dA, dT, and dC are 2-deoxy A, T, and C; (Ahd) is 2′-O-hexadecyl adenosine-3′-phosphate; VP is Vinyl-phosphonate; and s is a phosphorothioate linkage.

24. A pharmaceutical composition for inhibiting expression of a gene encoding α-Synuclein (SNCA), comprising the sodium salt of a double stranded ribonucleic acid (dsRNA) agent of claim 23 and a pharmaceutically acceptable excipient or carrier.

25. A method for inhibiting expression of a gene encoding α-Synuclein (SNCA) in a cell, comprising contacting the cell with the sodium salt of a double stranded ribonucleic acid (dsRNA) agent of claim 23.

26. A method for inhibiting expression of a gene encoding α-Synuclein (SNCA) in a subject, comprising administering to the subject the pharmaceutical composition of claim 23.

27. The method of claim 26, wherein the subject has been diagnosed with Parkinson's disease.

28. The method of claim 26, wherein the subject has been diagnosed with multiple system atrophy (MSA) or Lewy body dementia (LBD).

29. The method of claim 26, wherein the pharmaceutical composition is administered intrathecally.

30. A method for treating an SNCA-associated disease in a subject, the method comprising administering to the subject a therapeutically effective amount of the dsRNA agent, or a pharmaceutically acceptable salt thereof, of claim 1, thereby treating an SNCA-associated disease in the subject.
